(19) United States
(12) Patent Application Publication
(10) Pub. No.: US 2024/0059758 A1
(43) Pub. Date: Feb. 22, 2024

(54) THERAPEUTIC ANTIBODIES WITH NEUTRALIZING ACTIVITY AGAINST SARS-COV-2 GLYCOPROTEIN S

(71) Applicant: CORAT THERAPEUTICS GMBH, Braunschweig (DE)

(72) Inventors: André Frenzel, Braunschweig (DE); Philipp Kuhn, Bremen (DE); Jonas Kügler, Braunschweig (DE); Michael Hust, Braunschweig (DE); Stefan Dübel, Braunschweig (DE); Doris Meier, St. Andreasberg (DE); Federico Bertoglio, Braunschweig (DE); Maren Schubert, Braunschweig (DE); Stephan Steinke, Braunschweig (DE); Marlies Becker, Braunschweig (DE); Viola Fühner, Braunschweig (DE); Maximilian Ruschig, Braunschweig (DE); Philip Alexander Heine, Braunschweig (DE); Kai-Thomas Schneider, Braunschweig (DE); Rico Ballmann, Braunschweig (DE); Susanne Zock-Emmenthal, Wolfsburg (DE); Kristian Daniel Ralph Roth, Braunschweig (DE); Nora Langreder, Braunschweig (DE)

(21) Appl. No.: 18/000,672

(22) PCT Filed: May 19, 2021
(86) PCT No.: PCT/EP2021/063307

§ 371 Date: Dec. 2, 2022

(30) Foreign Application Priority Data
Jun. 4, 2020 (EP) 20178327.1
Jun. 4, 2020 (EP) 20178386.7
Jun. 10, 2020 (EP) 20179323.9
Jun. 18, 2020 (EP) 20180942.3
Jul. 3, 2020 (EP) 20184057.6
Nov. 27, 2020 (EP) 20210462.6
Nov. 30, 2020 (EP) 20210803.1

(51) Int. Cl. C07K 16/10; A61P 31/14

(52) U.S. Cl. CPC C07K 16/1003; A61P 31/14; C07K 2317/76; C07K 2317/34; A61K 2039/505

(57) ABSTRACT

The present invention is related to antibodies and antigen-binding fragments of antibodies that specifically bind the SARS-CoV-2 glycoprotein S (spike) as well as diagnostic and therapeutic methods of using those antibodies.

### SEQUENCE LISTING

[0001] The instant application contains a Sequence Listing which has been submitted electronically in ASCII format and is hereby incorporated by reference in its entirety. Said ASCII copy, created on Jul. 6, 2023, is named 009655_00002_SL.txt and is 1,231,942 bytes in size.

### FIELD OF THE INVENTION

[0002] The present invention is related to antibodies and antigen-binding fragments of antibodies that specifically bind the SARS-CoV-2 glycoprotein S (spike) as well as diagnostic and therapeutic methods of using those antibodies.

### BACKGROUND OF THE INVENTION

[0003] Coronavirus disease 2019 (COVID-19) is a highly infectious disease caused by severe acute respiratory syndrome coronavirus 2 (SARS-CoV-2).

[0004] Common symptoms of COVID-19 include fever, cough, fatigue, shortness of breath, and loss of smell and taste. While the majority of cases result in mild symptoms, some progress to acute respiratory distress syndrome (ARDS) characterized by a cytokine storm, multi-organ failure, septic shock, and blood clots. The time from exposure to onset of symptoms is typically around five days, but may range from two to fourteen days.

[0005] SARS-CoV-2 was previously referred to by its provisional name, “2019 novel coronavirus” (2019-nCoV). As described by the National Institutes of Health, it is the successor to “SARS-CoV-1” (or just “SARS-CoV”). It is believed to have zoonotic origins and has close genetic similarity to bat coronaviruses, suggesting it emerged from a bat-borne virus.

[0006] Taxonomically, SARS-CoV-2 belongs to the coronaviridae, positive-sense single-stranded RNA viruses. Coronaviruses are large, roughly spherical, particles with bulbous surface projections. The average diameter of the virus particles is around 125 nm (0.125 μm). The diameter of the envelope is 85 nm and the spikes are 20 nm long.

[0007] The viral envelope consists of a lipid bilayer, in which the membrane (M), envelope (E) and spike (S) structural proteins are anchored. The ratio of E:S:M in the lipid bilayer is approximately 1:20:300 (wt/wt). On average a coronavirus particle has 74 surface spikes.

[0008] The coronavirus surface spikes are homotrimers of the glycoprotein protein S, which is composed of an S1 and S2 subunit.

[0009] It is believed that, similar to SARS-CoV and MERS, the virus mainly enters human cells by binding specifically to the receptor angiotensin converting enzyme 2 (ACE2). It is believed that the S1-domain of the spike glycoprotein binds host's ACE2-receptor and the S2 domain mediates the viral fusion with the host cell membrane.

[0010] Although some similarities between SARS-CoV and SARS-CoV-2 exist, it has been found that SARS-CoV-2 S protein binds specifically ACE2 with significant higher affinity than SARS-CoV (10- to 20-fold). Furthermore, it was shown that antibody cross-reactivity is limited between the two virus S proteins, suggesting its recognition to ACE2 is different as compared to SARS-CoV.

[0011] Several published SARS-CoV Abs do not have appreciable binding specifically to SARS-CoV-2 S protein. A recent study (Tian et al., 2020) shows a SARS-CoV antibody, CR3022, which binds specifically to SARS-CoV-2 RBD (receptor binding domain), but to a highly conserved region outside of the ACE2-RBD-interaction site and with weak or absent neutralization capability.

[0012] As of today, globally more than 5.600.000 people are reported to be infected with SARS-CoV-2, and about 350.000 people died because of COVID-19.

[0013] Neutralizing antibodies of therapeutic quality, which prevent the virus from entering the host cell would be of vital importance as primary treatment, especially in the case of COVID-19 where no medication or vaccination has been identified.

[0014] Thus, a great need exists to develop neutralizing antibodies, which prevent the infection with SARS-CoV-2 in a quality suitable for therapeutic use.

[0015] Furthermore, it has been reported that SARS-CoV-2 shows “escape”-mutations. These are mutations especially in the RBD-region, which still enable the virus to bind to cellular ACE-2 protein via its spike-protein, but seem to allow the evasion of host's immune response.

[0016] This finding is of great importance for estimating the chances of a re-infection with SARS-CoV-2 after having successfully overcome a first SARS-CoV-2-infection, as well as having an impact on the development of vaccines and the treatment with antiviral agents, such as monoclonal antibodies.

[0017] Prior art attempts to overcome the danger of the virus building a resistance against certain treatments include the use of polyclonal antibodies or cocktails of two or more monoclonal antibodies, which bind to different epitopes of the target protein.

[0018] However, these strategies comprise other negative consequences. For example, polyclonal antibodies do show a wide range of specificity and, consequently, are difficult to predict in their efficacy. Therapeutics based on polyclonal antibodies are therefore difficult to dose and to be produced with constant quality.

[0019] Cocktails of two or more monoclonal antibodies immediately double the costs of production and, since the efficacy and pharmacokinetic properties of each antibody differ, are difficult to formulate in order to maintain reliable administration schemes.

[0020] The present invention, however, provides monoclonal antibodies which show an advantageous binding profile to the S1-protein of SARS-CoV-2 allowing the binding and neutralization of SARS-CoV-2-activity of seven different “escape”-mutants reported up to date, as well as also the binding specifically to the “7-PM-mutant”, which comprises all seven known “escape”-mutations in one molecule.

### DETAILED DESCRIPTION

[0021] In a first embodiment, the present invention pertains to a therapeutic antibody or antigen-binding fragment thereof that binds specifically to SARS-CoV-2 glycoprotein S with the amino acid sequence of SEQ ID NO: 02 and neutralizes the infectious activity of SARS-CoV-2.

[0022] In a second embodiment, the present invention pertains to a therapeutic antibody or antigen-binding fragment thereof, wherein said antibody or antigen-binding fragment thereof competes for binding to the SARS-CoV-2 glycoprotein S with an antibody comprising a heavy chain variable region of the amino acid sequence in SEQ ID NO: 406; and a light chain variable region of the amino acid sequence in SEQ ID NO: 408.

[0023] In another embodiment, the present invention pertains to a therapeutic antibody or antigen-binding fragment thereof, wherein said antibody or antigen-binding fragment thereof competes for binding to the SARS-CoV-2 glycoprotein S with an antibody comprising at least one, two, three or all of the amino acid sequences of SEQ ID NO: 909-928 (YU505-A02); SEQ ID NO: 349 368 (YU536-D04); SEQ ID NOs: 389-408 (YU537-H11) and/or SEQ ID NO: 1305-1312 (STE90-C11).

[0024] In a fourth embodiment, the present invention pertains to a therapeutic antibody or antigen-binding fragment thereof, comprising a variable heavy chain with an amino acid sequence selected from the group consisting of SEQ ID NO: 26, 46, 66, 86, 106, 126, 146, 166, 186, 206, 226, 246, 266, 286, 306, 326, 346, 366, 386, 406, 426, 446, 466, 486, 506, 526, 546, 566, 586, 606, 626, 646, 666, 686, 706, 726, 746, 766, 786, 806, 826, 846, 866, 886, 906, 926, 946, 966, 986, 1006, 1026, 1046, 1066, 1086, 1106, 1126, 1146, 1166, 1186, 1206, 1226, 1246, 1266, and 1286;
[0025] and
[0026] a light chain with an amino acid sequence selected from the group consisting of SEQ ID NO: 28, 48, 68, 88, 108, 128, 148, 168, 188, 208, 228, 248, 268, 288, 308, 328, 348, 368, 388, 408, 428, 448, 468, 488, 508, 528, 548, 568, 588, 608, 628, 648, 668, 688, 708, 728, 748, 768, 788, 808, 828, 848, 868, 888, 908, 928, 948, 968, 988, 1008, 1028, 1048, 1068, 1088, 1108, 1128, 1148, 1168, 1188, 1208, 1228, 1248, 1268, and 288.

[0027] In another embodiment, the present invention pertains to a therapeutic antibody or antigen-binding fragment thereof, comprising a variable heavy chain with an amino acid sequence selected from the group consisting of SEQ ID NO: 1289, 1297, 1305, 1313, 1321, 1329, 1337, 1345, 1353, 1361, 1369, 1377, 1385, 1393, 1401, 1409, 1417, 1425, 1433, 1441, 1449, 1457, 1465, 1473, 1481, 1489, 1497, 1505, 1513, 1521, 1529, 1537, 1545, 1553, 1561, 1569, 1577, 1585, 1593, 1601, 1609, 1617, 1625, 1633, 1641, 1649, 1657, 1665, 1673, 1681, 1689, 1697, 1705, 1713, and 1721;
[0028] and
[0029] a light chain with an amino acid sequence selected from the group consisting of SEQ ID NO: 1293, 1301, 1309, 1317, 1325, 1333, 1341, 1349, 1357, 1365, 1373, 1381, 1389, 1397, 1405, 1413, 1421, 1429, 1437, 1445, 1453, 1461, 1469, 1477, 1485, 1493, 1501, 1509, 1517, 1525, 1533, 1541, 1549, 1557, 1565, 1573, 1581, 1589, 1597, 1605, 1613, 1621, 1629, 1637, 1645, 1653, 1661, 1669, 1677, 1685, 1693, 1701, 1709, 1717, and 1725.

[0030] Another aspect of the invention relates to a monoclonal antibody or an antigen-binding fragment thereof characterized by a VH region and optionally a VL region each comprising 3 CDRs designated as H-CDR1, H-CDR2, H-CDR3, L-CDR1, L-CDR2 and L-CDR3 defining the binding specificity of the antibody or the antigen-binding antibody fragment.

[0031] The position of CDRs within a VH or VL region can be defined according to Kabat, et al., Sequences of Proteins of Immunological Interest, 5th Ed. Public Health Service, National Institutes of Health, Bethesda, MD (1991). In another embodiment, the method IMGT may be used to define the CDRs (Brochet, X. et al., Nucl. Acids Res. 36, W503-508 (2008). PMID: 18503082. Giudicelli, V., Brochet, X., Lefranc, M.-P., Cold Spring Harb Protoc. 2011 Jun. 1; 2011 (6). pii: pdb.prot5633. doi: 10.1101/pdb.prot5633).

[0032] The CDR-sequences defined according to Kabat et al. are depicted in SEQ ID Nos: 10, 30, 50, 70, 90, 110, 130, 150, 170, 190, 210, 230, 250, 270, 290, 310, 330, 350, 370, 390, 410, 430, 450, 470, 490, 510, 530, 550, 570, 590, 610, 630, 650, 670, 690, 710, 730, 750, 770, 790, 810, 830, 850, 870, 890, 910, 930, 950, 970, 990, 1110, 1130, 1150, 1170, 1190, 1210, 1230, 1250, 1270;
[0033] 12, 32, 52, 72, 92, 112, 132, 152, 172, 192, 212, 232, 252, 272, 292, 312, 332, 352, 372, 392, 412, 432, 452, 472, 492, 512, 532, 552, 572, 592, 612, 632, 652, 672, 692, 712, 732, 752, 772, 792, 812, 832, 852, 872, 892, 912, 932, 952, 972, 992, 1112, 1132, 1152, 1172, 1192, 1212, 1232, 1252, 1272;
[0034] 14, 34, 54, 74, 94, 114, 134, 154, 174, 194, 214, 234, 254, 274, 294, 314, 334, 354, 374, 394, 414, 434, 454, 474, 494, 514, 534, 554, 574, 594, 614, 634, 654, 674, 694, 714, 734, 754, 774, 794, 814, 834, 854, 874, 894, 914, 934, 954, 974, 994, 1114, 1134, 1154, 1174, 1194, 1214, 1234, 1254, 1274;
[0035] 16, 36, 56, 76, 96, 116, 136, 156, 176, 196, 216, 236, 256, 276, 296, 316, 336, 356, 376, 396, 416, 436, 456, 476, 496, 516, 536, 556, 576, 596, 616, 636, 656, 676, 696, 716, 736, 756, 776, 796, 816, 836, 856, 876, 896, 916, 936, 956, 976, 996, 1116, 1136, 1156, 1176, 1196, 1216, 1236, 1256, 1276;
[0036] 18, 38, 58, 78, 98, 118, 138, 158, 178, 198, 218, 238, 258, 278, 298, 318, 338, 358, 378, 398, 418, 438, 458, 478, 498, 518, 538, 558, 578, 598, 618, 638, 658, 678, 698, 718, 738, 758, 778, 798, 818, 838, 858, 878, 898, 918, 938, 958, 978, 998, 1118, 1138, 1158, 1178, 1198, 1218, 1238, 1258, 1278;
[0037] 20, 40, 60, 80, 100, 120, 140, 160, 180, 200, 220, 240, 260, 280, 300, 320, 340, 360, 380, 400, 420, 440, 460, 480, 500, 520, 540, 560, 580, 600, 620, 640, 660, 680, 700, 720, 740, 760, 780, 800, 820, 840, 860, 880, 900, 920, 940, 960, 980, 1000, 1120, 1140, 1160, 1180, 1200, 1220, 1240, 1260, and 1280.

[0038] The CDR-sequences defined according to IMGT are depicted in SEQ ID Nos: 1290, 1298, 1306, 1314, 1322, 1330, 1338, 1346, 1354, 1362, 1370, 1378, 1386, 1394, 1402, 1410, 1418, 1426, 1434, 1442, 1450, 1458, 1466, 1474, 1482, 1490, 1498, 1506, 1514, 1522, 1530, 1538, 1546, 1554, 1562, 1570, 1578, 1586, 1594, 1602, 1610, 1618, 1626, 1634, 1642, 1650, 1658, 1666, 1674, 1682, 1690, 1698, 1706, 1714, 1722;
[0039] 1291, 1299, 1307, 1315, 1323, 1331, 1339, 1347, 1355, 1363, 1371, 1379, 1387, 1395, 1403, 1411, 1419, 1427, 1435, 1443, 1451, 1459, 1467, 1475, 1483, 1491, 1499, 1507, 1515, 1523, 1531, 1539, 1547, 1555, 1563, 1571, 1579, 1587, 1595, 1603, 1611, 1619, 1627, 1635, 1643, 1651, 1659, 1667, 1675, 1683, 1691, 1699, 1707, 1715, 1723;
[0040] 1292, 1300, 1308, 1316, 1324, 1332, 1340, 1348, 1356, 1364, 1372, 1380, 1388, 1396, 1404, 1412, 1420, 1428, 1436, 1444, 1452, 1460, 1468, 1476, 1484, 1492, 1500, 1508, 1516, 1524, 1532, 1540, 1548, 1556, 1564, 1572, 1580, 1588, 1596, 1604, 1612, 1620, 1628, 1636, 1644, 1652, 1660, 1668, 1676, 1684, 1692, 1700, 1708, 1716, 1724;
[0041] 1294, 1302, 1310, 1318, 1326, 1334, 1342, 1350, 1358, 1366, 1374, 1382, 1390, 1398, 1406, 1414, 1422, 1430, 1438, 1446, 1454, 1462, 1470, 1478, 1486, 1494, 1502, 1510, 1518, 1526, 1534, 1542, 1550, 1558, 1566, 1574, 1582, 1590, 1598, 1606, 1614, 1622, 1630, 1638, 1646, 1654, 1662, 1670, 1678, 1686, 1694, 1702, 1710, 1718, 1726;
[0042] 1295, 1303, 1311, 1319, 1327, 1335, 1343, 1351, 1359, 1367, 1375, 1383, 1391, 1399, 1407, 1415, 1423, 1431, 1439, 1447, 1455, 1463, 1471, 1479, 1487, 1495, 1503, 1511, 1519, 1527, 1535, 1543, 1551, 1559, 1567, 1575, 1583, 1591, 1599, 1607, 1615, 1623, 1631, 1639, 1647, 1655, 1663, 1671, 1679, 1687, 1695, 1703, 1711, 1719, 1727;
[0043] 1296, 1304, 1312, 1320, 1328, 1336, 1344, 1352, 1360, 1368, 1376, 1384, 1392, 1400, 1408, 1416, 1424, 1432, 1440, 1448, 1456, 1464, 1472, 1480, 1488, 1496, 1504, 1512, 1520, 1528, 1536, 1544, 1552, 1560, 1568, 1576, 1584, 1592, 1600, 1608, 1616, 1624, 1632, 1640, 1648, 1656, 1664, 1672, 1680, 1688, 1696, 1704, 1712, 1720, and 1728.

[0044] According to the present invention, a VH region or the CDRs thereof alone may constitute a complete antigen-binding site. In certain embodiments, the antibody comprises a VH region or the CDRs thereof as defined herein alone. In certain embodiments, the antibody comprises a VH region or the CDRs thereof as defined herein together with a VL region or the CDRs thereof, particularly with a VL region or the CDRs thereof as defined herein. Thus, the present invention pertains in some embodiments to an antibody or antigen-binding fragment thereof, comprising:
[0045] a heavy chain CDR1 (H-CDR1) domain with an amino acid sequence selected from the group consisting of SEQ ID NO: 10, 30, 50, 70, 90, 110, 130, 150, 170, 190, 210, 230, 250, 270, 290, 310, 330, 350, 370, 390, 410, 430, 450, 470, 490, 510, 530, 550, 570, 590, 610, 630, 650, 670, 690, 710, 730, 750, 770, 790, 810, 830, 850, 870, 890, 910, 930, 950, 970, 990, 1110, 1130, 1150, 1170, 1190, 1210, 1230, 1250, and 1270;
[0046] a heavy chain CDR2 (H-CDR2) domain with an amino acid sequence selected from the group consisting of SEQ ID NO: 12, 32, 52, 72, 92, 112, 132, 152, 172, 192, 212, 232, 252, 272, 292, 312, 332, 352, 372, 392, 412, 432, 452, 472, 492, 512, 532, 552, 572, 592, 612, 632, 652, 672, 692, 712, 732, 752, 772, 792, 812, 832, 852, 872, 892, 912, 932, 952, 972, 992, 1112, 1132, 1152, 1172, 1192, 1212, 1232, 1252, and 1272;
[0047] a heavy chain CDR3 (H-CDR3) domain with an amino acid sequence selected from the group consisting of SEQ ID NO: 14, 34, 54, 74, 94, 114, 134, 154, 174, 194, 214, 234, 254, 274, 294, 314, 334, 354, 374, 394, 414, 434, 454, 474, 494, 514, 534, 554, 574, 594, 614, 634, 654, 674, 694, 714, 734, 754, 774, 794, 814, 834, 854, 874, 894, 914, 934, 954, 974, 994, 1114, 1134, 1154, 1174, 1194, 1214, 1234, 1254, and 1274;
[0048] and
[0049] a light chain CDR1 (L-CDR1) domain with an amino acid sequence selected from the group consisting of SEQ ID NO: 16, 36, 56, 76, 96, 116, 136, 156, 176, 196, 216, 236, 256, 276, 296, 316, 336, 356, 376, 396, 416, 436, 456, 476, 496, 516, 536, 556, 576, 596, 616, 636, 656, 676, 696, 716, 736, 756, 776, 796, 816, 836, 856, 876, 896, 916, 936, 956, 976, 996, 1116, 1136, 1156, 1176, 1196, 1216, 1236, 1256, and 1276;
[0050] a light chain CDR2 (L-CDR2) domain with an amino acid sequence selected from the group consisting of SEQ ID NO: 18, 38, 58, 78, 98, 118, 138, 158, 178, 198, 218, 238, 258, 278, 298, 318, 338, 358, 378, 398, 418, 438, 458, 478, 498, 518, 538, 558, 578, 598, 618, 638, 658, 678, 698, 718, 738, 758, 778, 798, 818, 838, 858, 878, 898, 918, 938, 958, 978, 998, 1118, 1138, 1158, 1178, 1198, 1218, 1238, 1258, and 1278;
[0051] a light chain CDR3 (L-CDR3) domain with an amino acid sequence selected from the group consisting of SEQ ID NO: 20, 40, 60, 80, 100, 120, 140, 160, 180, 200, 220, 240, 260, 280, 300, 320, 340, 360, 380, 400, 420, 440, 460, 480, 500, 520, 540, 560, 580, 600, 620, 640, 660, 680, 700, 720, 740, 760, 780, 800, 820, 840, 860, 880, 900, 920, 940, 960, 980, 1000, 1120, 1140, 1160, 1180, 1200, 1220, 1240, 1260, and 1280.

[0052] In another embodiment, the present invention pertains to an antibody or antigen-binding fragment thereof, comprising:
[0053] a heavy chain CDR1 (H-CDR1) domain with an amino acid sequence selected from the group consisting of SEQ ID NO: 1290, 1298, 1306, 1314, 1322, 1330, 1338, 1346, 1354, 1362, 1370, 1378, 1386, 1394, 1402, 1410, 1418, 1426, 1434, 1442, 1450, 1458, 1466, 1474, 1482, 1490, 1498, 1506, 1514, 1522, 1530, 1538, 1546, 1554, 1562, 1570, 1578, 1586, 1594, 1602, 1610, 1618, 1626, 1634, 1642, 1650, 1658, 1666, 1674, 1682, 1690, 1698, 1706, 1714, and 1722;
[0054] a heavy chain CDR2 (H-CDR2) domain with an amino acid sequence selected from the group consisting of SEQ ID NO: 1291, 1299, 1307, 1315, 1323, 1331, 1339, 1347, 1355, 1363, 1371, 1379, 1387, 1395, 1403, 1411, 1419, 1427, 1435, 1443, 1451, 1459, 1467, 1475, 1483, 1491, 1499, 1507, 1515, 1523, 1531, 1539, 1547, 1555, 1563, 1571, 1579, 1587, 1595, 1603, 1611, 1619, 1627, 1635, 1643, 1651, 1659, 1667, 1675, 1683, 1691, 1699, 1707, 1715, and 1723;
[0055] a heavy chain CDR3 (H-CDR3) domain with an amino acid sequence selected from the group consisting of SEQ ID NO: 1292, 1300, 1308, 1316, 1324, 1332, 1340, 1348, 1356, 1364, 1372, 1380, 1388, 1396, 1404, 1412, 1420, 1428, 1436, 1444, 1452, 1460, 1468, 1476, 1484, 1492, 1500, 1508, 1516, 1524, 1532, 1540, 1548, 1556, 1564, 1572, 1580, 1588, 1596, 1604, 1612, 1620, 1628, 1636, 1644, 1652, 1660, 1668, 1676, 1684, 1692, 1700, 1708, 1716, and 1724;
[0056] and
[0057] a light chain CDR1 (L-CDR1) domain with an amino acid sequence selected from the group consisting of SEQ ID NO: 1294, 1302, 1310, 1318, 1326, 1334, 1342, 1350, 1358, 1366, 1374, 1382, 1390, 1398, 1406, 1414, 1422, 1430, 1438, 1446, 1454, 1462, 1470, 1478, 1486, 1494, 1502, 1510, 1518, 1526, 1534, 1542, 1550, 1558, 1566, 1574, 1582, 1590, 1598, 1606, 1614, 1622, 1630, 1638, 1646, 1654, 1662, 1670, 1678, 1686, 1694, 1702, 1710, 1718, and 1726;
[0058] a light chain CDR2 (L-CDR2) domain with an amino acid sequence selected from the group consisting of SEQ ID NO: 1295, 1303, 1311, 1319, 1327, 1335, 1343, 1351, 1359, 1367, 1375, 1383, 1391, 1399, 1407, 1415, 1423, 1431, 1439, 1447, 1455, 1463, 1471, 1479, 1487, 1495, 1503, 1511, 1519, 1527, 1535, 1543, 1551, 1559, 1567, 1575, 1583, 1591, 1599, 1607, 1615, 1623, 1631, 1639, 1647, 1655, 1663, 1671, 1679, 1687, 1695, 1703, 1711, 1719, and 1727;
[0059] a light chain CDR3 (L-CDR3) domain with an amino acid sequence selected from the group consisting of SEQ ID NO: 1296, 1304, 1312, 1320, 1328, 1336, 1344, 1352, 1360, 1368, 1376, 1384, 1392, 1400, 1408, 1416, 1424, 1432, 1440, 1448, 1456, 1464, 1472, 1480, 1488, 1496, 1504, 1512, 1520, 1528, 1536, 1544, 1552, 1560, 1568, 1576, 1584, 1592, 1600, 1608, 1616, 1624, 1632, 1640, 1648, 1656, 1664, 1672, 1680, 1688, 1696, 1704, 1712, 1720, and 1728.

[0060] In certain embodiments, the antibody or antigen-binding fragment thereof comprises a VH region comprising the H-CDR1 of SEQ ID NO:10, the H-CDR2 of SEQ ID NO:12, and the HCDR3 of SEQ ID NO:14, and optionally a VL region comprising the L-CDR1 of SEQ ID NO:16, the L-CDR2 of the SEQ ID NO:18 and the L-CDR3 of the SEQ ID NO:20; and so forth as depicted in table 1:

TABLE 1
Composition of certain antibody or antigen-binding fragments thereof

| VH-region | | | and, optionally, a VL-region | | |
|---|---|---|---|---|---|
| H-CDR1, | H-CDR2, | H-CDR3, | L-CDR1, | L-CDR2, | L-CDR3, |
| SEQ ID NO.: | SEQ ID NO.: | SEQ ID NO.: | SEQ ID NO.: | SEQ ID NO.: | SEQ ID NO.: |
| 10 | 12 | 14 | 16 | 18 | 20 |
| 30 | 32 | 34 | 36 | 38 | 40 |
| 50 | 52 | 54 | 56 | 58 | 60 |
| 70 | 72 | 74 | 76 | 78 | 80 |
| 90 | 92 | 94 | 96 | 98 | 100 |
| 110 | 112 | 114 | 116 | 118 | 120 |
| 130 | 132 | 134 | 136 | 138 | 140 |
| 150 | 152 | 154 | 156 | 158 | 160 |
| 170 | 172 | 174 | 176 | 178 | 180 |
| 190 | 192 | 194 | 196 | 198 | 200 |
| 210 | 212 | 214 | 216 | 218 | 220 |
| 230 | 232 | 234 | 236 | 238 | 240 |
| 250 | 252 | 254 | 256 | 258 | 260 |
| 270 | 272 | 274 | 276 | 278 | 280 |
| 290 | 292 | 294 | 296 | 298 | 300 |
| 310 | 312 | 314 | 316 | 318 | 320 |
| 330 | 332 | 334 | 336 | 338 | 340 |
| 350 | 352 | 354 | 356 | 358 | 360 |
| 370 | 372 | 374 | 376 | 378 | 380 |
| 390 | 392 | 394 | 396 | 398 | 400 |
| 410 | 412 | 414 | 416 | 418 | 420 |
| 430 | 432 | 434 | 436 | 438 | 440 |
| 450 | 452 | 454 | 456 | 458 | 460 |
| 470 | 472 | 474 | 476 | 478 | 480 |
| 490 | 492 | 494 | 496 | 498 | 500 |
| 510 | 512 | 514 | 516 | 518 | 520 |
| 530 | 532 | 534 | 536 | 538 | 540 |
| 550 | 552 | 554 | 556 | 558 | 560 |
| 570 | 572 | 574 | 576 | 578 | 580 |
| 590 | 592 | 594 | 596 | 598 | 600 |
| 610 | 612 | 614 | 616 | 618 | 620 |
| 630 | 632 | 634 | 636 | 638 | 640 |
| 650 | 652 | 654 | 656 | 658 | 660 |
| 670 | 672 | 674 | 676 | 678 | 680 |
| 690 | 692 | 694 | 696 | 698 | 700 |
| 710 | 712 | 714 | 716 | 718 | 720 |
| 730 | 732 | 734 | 736 | 738 | 740 |
| 750 | 752 | 754 | 756 | 758 | 760 |
| 770 | 772 | 774 | 776 | 778 | 780 |
| 790 | 792 | 794 | 796 | 798 | 800 |
| 810 | 812 | 814 | 816 | 818 | 820 |
| 830 | 832 | 834 | 836 | 838 | 840 |
| 850 | 852 | 854 | 856 | 858 | 860 |
| 870 | 872 | 874 | 876 | 878 | 880 |
| 890 | 892 | 894 | 896 | 898 | 900 |
| 910 | 912 | 914 | 916 | 918 | 920 |
| 930 | 932 | 934 | 936 | 938 | 940 |
| 950 | 952 | 954 | 956 | 958 | 960 |
| 970 | 972 | 974 | 976 | 978 | 980 |
| 990 | 992 | 994 | 996 | 998 | 1000 |
| 1010 | 1012 | 1014 | 1016 | 1018 | 1020 |
| 1030 | 1032 | 1034 | 1036 | 1038 | 1040 |
| 1050 | 1052 | 1054 | 1056 | 1058 | 1060 |
| 1070 | 1072 | 1074 | 1076 | 1078 | 1080 |
| 1090 | 1092 | 1094 | 1096 | 1098 | 1100 |
| 1110 | 1112 | 1114 | 1116 | 1118 | 1120 |
| 1130 | 1132 | 1134 | 1136 | 1138 | 1140 |
| 1150 | 1152 | 1154 | 1156 | 1158 | 1160 |
| 1170 | 1172 | 1174 | 1176 | 1178 | 1180 |
| 1190 | 1192 | 1194 | 1196 | 1198 | 1200 |
| 1210 | 1212 | 1214 | 1216 | 1218 | 1220 |
| 1230 | 1232 | 1234 | 1236 | 1238 | 1240 |
| 1250 | 1252 | 1254 | 1256 | 1258 | 1260 |
| 1270 | 1272 | 1274 | 1276 | 1278 | 1280 |
| 1290 | 1291 | 1292 | 1294 | 1295 | 1296 |
| 1298 | 1299 | 1300 | 1302 | 1303 | 1304 |
| 1306 | 1307 | 1308 | 1310 | 1311 | 1312 |
| 1314 | 1315 | 1316 | 1318 | 1319 | 1320 |
| 1322 | 1323 | 1324 | 1326 | 1327 | 1328 |
| 1330 | 1331 | 1332 | 1334 | 1335 | 1336 |
| 1338 | 1339 | 1340 | 1342 | 1343 | 1344 |
| 1346 | 1347 | 1348 | 1350 | 1351 | 1352 |
| 1354 | 1355 | 1356 | 1358 | 1359 | 1360 |
| 1362 | 1363 | 1364 | 1366 | 1367 | 1368 |
| 1370 | 1371 | 1372 | 1374 | 1375 | 1376 |
| 1378 | 1379 | 1380 | 1382 | 1383 | 1384 |
| 1386 | 1387 | 1388 | 1390 | 1391 | 1392 |
| 1394 | 1395 | 1396 | 1398 | 1399 | 1400 |
| 1402 | 1403 | 1404 | 1406 | 1407 | 1408 |
| 1410 | 1411 | 1412 | 1414 | 1415 | 1416 |
| 1418 | 1419 | 1420 | 1422 | 1423 | 1424 |
| 1426 | 1427 | 1428 | 1430 | 1431 | 1432 |
| 1434 | 1435 | 1436 | 1438 | 1439 | 1440 |
| 1442 | 1443 | 1444 | 1446 | 1447 | 1448 |
| 1450 | 1451 | 1452 | 1454 | 1455 | 1456 |
| 1458 | 1459 | 1460 | 1462 | 1463 | 1464 |
| 1466 | 1467 | 1468 | 1470 | 1471 | 1472 |
| 1474 | 1475 | 1476 | 1478 | 1479 | 1480 |
| 1482 | 1483 | 1484 | 1486 | 1487 | 1488 |
| 1490 | 1491 | 1492 | 1494 | 1495 | 1496 |
| 1498 | 1499 | 1500 | 1502 | 1503 | 1504 |
| 1506 | 1507 | 1508 | 1510 | 1511 | 1512 |
| 1514 | 1515 | 1516 | 1518 | 1519 | 1520 |
| 1522 | 1523 | 1524 | 1526 | 1527 | 1528 |
| 1530 | 1531 | 1532 | 1534 | 1535 | 1536 |
| 1538 | 1539 | 1540 | 1542 | 1543 | 1544 |
| 1546 | 1547 | 1548 | 1550 | 1551 | 1552 |
| 1554 | 1555 | 1556 | 1558 | 1559 | 1560 |
| 1562 | 1563 | 1564 | 1566 | 1567 | 1568 |
| 1570 | 1571 | 1572 | 1574 | 1575 | 1576 |
| 1578 | 1579 | 1580 | 1582 | 1583 | 1584 |
| 1586 | 1587 | 1588 | 1590 | 1591 | 1592 |
| 1594 | 1595 | 1596 | 1598 | 1599 | 1600 |
| 1602 | 1603 | 1604 | 1606 | 1607 | 1608 |
| 1610 | 1611 | 1612 | 1614 | 1615 | 1616 |
| 1618 | 1619 | 1620 | 1622 | 1623 | 1624 |
| 1626 | 1627 | 1628 | 1630 | 1631 | 1632 |
| 1634 | 1635 | 1636 | 1638 | 1639 | 1640 |
| 1642 | 1643 | 1644 | 1646 | 1647 | 1648 |
| 1650 | 1651 | 1652 | 1654 | 1655 | 1656 |
| 1658 | 1659 | 1660 | 1662 | 1663 | 1664 |
| 1666 | 1667 | 1668 | 1670 | 1671 | 1672 |
| 1674 | 1675 | 1676 | 1678 | 1679 | 1680 |
| 1682 | 1683 | 1684 | 1686 | 1687 | 1688 |
| 1690 | 1691 | 1692 | 1694 | 1695 | 1696 |
| 1698 | 1699 | 1700 | 1702 | 1703 | 1704 |
| 1706 | 1707 | 1708 | 1710 | 1711 | 1712 |
| 1714 | 1715 | 1716 | 1718 | 1719 | 1720 |
| 1722 | 1723 | 1724 | 1726 | 1727 | 1728 |

[0061] The terms “SARS-CoV-2 glycoprotein S”, “S protein”, “homotrimeric S protein”, “spike protein” or “SARS-CoV-2 spike glycoprotein” and “SARS-CoV-2 S protein”, as used herein, all refer to the same protein having the nucleic acid sequence shown in SEQ ID NO: 01 and the amino acid sequence of SEQ ID NO: 02, or a substantially similar variant thereof, or a biologically active fragment thereof.

[0062] SARS-CoV-2 can be divided into different strains. According to their genotype and distribution the strains may be divided into the following subgroups: The “L-Lineage” comprises WH 2019/12/30.h, Thailand 2020/01/13.a, Japan 2020/01/25.a, TW 2020/02/05.a, WH 2020/01/02.a, WW2020/01/02.b, USA-2020/01/27.a, FS 2020/01/22.c, FS-2020/01/22.b, USA 2020/01/31.a, GZ_2020/01/22.a, Japan_2020/01/29.b, WH 2020/01/01.c, GO-2020/01/17.a, GD-2020/01/22.a, GD-020/01/18.a, USA_2020/01/29.a, WH 2019/12/30.i, Germany_2020/01/28.a, WH 2020/01/07.a, Nepal 2020/01/13.a, Thailand 2020/01/08.a, HZ 2020701/20.a, Sydney 2020/01/22.a, ZJ 202CY/01/16.a, WH 2019/12/30.1, Singapore 2020/01/25.a, Singapore 2020/01/23.a, GD 2020/01/23.a, France 2020/01/29.a, WH 2019/12/30.f, HZ 2020/01/19.a, WH 2019/12/30.g, WH 2019/12/30.k, USA 2020/01/29.b, FS 2020/01/22.a, USA 2020/01/29.c, USA-2020/01/29.d, SZ 2020/01/16.a, USA_2020/01/21.a, GD 2020/0115.b, SZ_2020/01/16, WH 2019/12/30.n, WH 2019/12/30.c, JS 2020/01TI9.a, WH_2019/12/26.a, ZJ 2020/01/17.a, WI, 2020/01/01.b, JX 2020/01/11.a, WH 2020/01/01.e, WH 2019/12/30.m, WH 2019/12/30.b, WH 2019/12/30.e, CQ 2020/01/23.a, WH_2020/01/01.f, WH 2020/01/01.a, WW2020/01/01.d, WH 2019/12730.a, WH 2019/12/30.d, WH 2019/12/24.a, WH 2019/12/30.j, France 2020/01/23.a, France 2020/01/23.b, TW 2020/01/23.a, Sydney 2020/01/25.a, USA 2020/01/22.a, Australia_2020/01/25.a, Skorea_2020/01.a, WH_2019/12/31.a, France 2020/01/29.b, Singapore 2020/02/01.a, CQ_2020/01/18.a, and SD_2020/01/19.a.

[0063] The “S-Lineage” comprises SZ 2020/01/13.a, GD_2020/01/15.c, SZ_2020/01/13.a, GD2020/01/15.a, GD 2020/01/14.a, SZ 2020/01/10.a, Japan 2020/01/31.b, Japan 2020/01/31.a, Japan 2020/01/29.a, SZ 2020/01/13.b, SZ_2020/01/11.a, USA 2020/01/28.a, SC 2020/01/15.a, USA 2020/01/23.a, Vietnam_2020/01/24.a, Korea 2020/01/25.a, WH 2020/01/05.a, Australia 2020/01/24.a, Belgium 2020/02/03.a, TW 2020/01731.a, Australia 2020/01/28.a, Australia 2020/01/30.a, England 2020/01/29.a, England 2020/01/29.b, USA 2020/01/25.a, USA2020/01/19.a, USA ˜020/01/25.b, CQ 2020/01/21.a, USA 2020/01/22.b, YN_2020/01/17.b, and YN_2020/01/17.a.

[0064] In one embodiment the therapeutic antibody or antigen-binding fragment thereof is preferred which binds specifically to at least one of the SARS-CoV-2 glycoprotein S from the above mentioned strains. In yet another embodiment it binds specifically more preferably to the SARS-CoV-2 glycoprotein S of one of the most abundant strains. In yet another embodiment the therapeutic antibody or antigen-binding fragment thereof binds specifically to the SARS-CoV-2 glycoproteins S of at least two, at least five, at least 10, at least 20, at least 30 strains. In a most preferred embodiment it binds specifically to the SARS-CoV-2 glycoproteins S of all SARS-CoV-2-strains listed above.

[0065] In another embodiment the therapeutic antibody or antigen-binding fragment thereof binds preferably to the SARS-CoV-2 glycoproteins S of at least one strain of the “L-lineage” as listed above. In yet another embodiment the therapeutic antibody or antigen-binding fragment thereof binds preferably to the SARS-CoV-2 glycoproteins S of at least one strain of the “P-strains” as listed above.

[0066] The homotrimeric S protein is a class I fusion protein which mediates the receptor binding and membrane fusion between the virus and host cell. The S1 subunit forms the head of the spike and has the receptor binding domain (RBD). The S2 subunit forms the stem which anchors the spike in the viral envelope and on protease activation enables fusion. In addition, the membrane bound host protease TMPRSS2 is responsible for S protein priming by cleavage of the furin site between S1 and S2 as well as the S2′ site for proteolytic activation, conformational change and viral entry.

[0067] The “S1 subunit”, as used herein, has the nucleic acid sequence shown in SEQ ID NO: 03 and the amino acid sequence of SEQ ID NO: 04, or a substantially similar variant thereof, or a biologically active fragment thereof.

[0068] The “receptor binding domain” (RBD) or “RBD” or “51-RBD”, as used herein, has the nucleic acid sequence shown in SEQ ID NO: 05 and the amino acid sequence of SEQ ID NO: 06, or a substantially similar variant thereof, or a biologically active fragment thereof.

[0069] SARS-CoV-2 is believed to bind via the RBD to ACE2, a surface protein of the host cell.

[0070] The term “Angiotensin-converting enzyme 2” or “ACE2”, as used herein, refers to the human version of Angiotensin-converting enzyme 2 having the nucleic acid sequence shown in SEQ ID NO: 07 and the amino acid sequence of SEQ ID NO: 08, or a biologically active fragment thereof.

[0071] For reference the following SEQ ID NOs pertain to the following molecules:
[0072] SEQ ID NO: 01—DNA-sequence of full-length SARS-CoV-2 glycoprotein S (Spike)
[0073] SEQ ID NO: 02—Protein-sequence of full-length SARS-CoV-2 glycoprotein S (Spike)
[0074] SEQ ID NO: 03—DNA-sequence of full-length of S1-subunit of the SARS-CoV-2 glycoprotein S
[0075] SEQ ID NO: 04—Protein-sequence of full-length of S1-subunit of the SARS-CoV-2 glycoprotein S
[0076] SEQ ID NO: 05—DNA-sequence of full-length of receptor binding domain (RBD) of the S1-subunit of SARS-CoV-2 glycoprotein S
[0077] SEQ ID NO: 06—Protein-sequence of full-length of receptor binding domain (RBD) of the S1-subunit of SARS-CoV-2 glycoprotein S
[0078] SEQ ID NO: 07—DNA-sequence of full-length human ACE2
[0079] SEQ ID NO: 08—Protein-sequence of full-length von human ACE2

[0080] In another embodiment the therapeutic antibody or antigen-binding fragment thereof specifically binds preferably to the version of the SARS-CoV-2 glycoproteins S as depicted in SEQ ID NO: 02 as well as at least one, two, three, four, five, six, or preferably all of the “escape”-mutants mentioned herein: S1-V367F, S1-N439K, S1-G4765, S1-V483A, S1-E484K, S1-G485R, S1F486V and S1-7PM (SEQ ID NO: 1730). (The numbering of the residues correspond to the numbering used in the SWISS-MODEL workspace (YP_009724390.1)(UniProt ID P0DTC2).

[0081] The use of the disclosed point mutations, preferably to the S1-7PM-mutant, for screening potential therapeutic antibodies, has the technical effect that antibodies are selected which bind not only to the “wild-type” virus, but also to other viral strains which have already developed or may develop mutations in near future. Thus, the therapeutic antibody or antigen-binding fragment thereof of the present invention is able to recognize both “wild-type” as well as mutated versions of the SARS-CoV-2-virus. Consequentially, patients with “wild-type” virus populations only, with variable virus populations, or viral populations only comprising mutated viruses, may still be treated with the inventive antibodies.

[0082] Additionally, a second effect is that it is more difficult for the virus to develop resistance to said antibodies, since the virus needs to mutate further in order to “escape” the binding of the therapeutic antibody or antigen-binding fragment thereof. As such no other strategies, like for example antibody-cocktails comprising two or more different antibodies need to be applied.

[0083] Thus, the antibodies of the present invention provide a “one fits all” solution, which is more costeffective and results in a simplified formulation scheme and market approval process.

[0084] The sequence alignment between the “wild-type” RBD-sequence (SEQ ID NO: 1830) and the S1-7PM mutation (SEQ ID NO: 1829) is depicted below, the respective point mutations are highlighted in bold:

| | | |
|---|---|---|
| 319 | RVQPTESIVRFPNITNLCPFGEVENATRFASVYAWNRKRISNCVADYSFL | 368 |
| 319 | RVQPTESIVRFPNITNLCPFGEVENATRFASVYAWNRKRISNCVADYSVL | 368 |
| 369 | YNSASFSTFKCYGVSPTKLNDLCFTNVYADSFVIRGDEVRQIAPGQTGKI | 418 |
| 369 | YNSASFSTFKCYGVSPTKLNDLCFTNVYADSFVIRGDEVRQIAPGQTGKI | 418 |
| 419 | ADYNYKLPDDFTGCVIAWNSKNLDSKVGGNYNYLYRLFRKSNLKPFERDI | 468 |
| 419 | ADYNYKLPDDFTGCVIAWNSNNLDSKVGGNYNYLYRLFRKSNLKPFERDI | 468 |
| 469 | STEIYQASSTPCNGAKRVNCYFPLQSYGFQPTNGVGYQPYRVVVLSFELL | 518 |
| 469 | STEIYQAGSTPCNGVEGFNCYFPLQSYGFQPTNGVGYQPYRVVVLSFELL | 518 |
| 519 | HAPATVCGPKKSTNLVKNKCVNFN (SEQ ID NO: 1829) | 542 |
| 519 | HAPATVCGPKKSTNLVKNKCVNFN (SEQ ID NO: 1830) | 542 |

[0085] The term “antibody”, as used herein, is intended to refer any antigen binding molecule, in some embodiments to immunoglobulin molecules comprised of four polypeptide chains, two heavy (H) chains and two light (L) chains interconnected by disulfide bonds. Each heavy chain is comprised of a heavy chain variable region (“HCVR” or “VH”) and a heavy chain constant region (comprised of domains CH1, CH2 and CH3). Each light chain is comprised of a light chain variable region (“LCVR or “VL”) and a light chain constant region (CL). The VH and VL regions can be further subdivided into regions of hypervariability, termed “complementarity determining regions” (CDR), interspersed with regions that are more conserved, termed “framework regions” (FR). Each VH and VL is composed of three CDRs and four FRs, arranged from amino-terminus to carboxy-terminus in the following order: FR1, CDR1, FR2, CDR2, FR3, CDR3, FR4.

[0086] Substitution of up to one, up to two or up to three amino acid residues per CDR, of up to two, up to three or up to four amino acid residues within all three CDRs of one light or heavy chain or omission of one or more CDRs is also possible.

[0087] In one embodiment up to one, up to two or up to three amino acid residues are substituted in HCDR1. In another embodiment up to one, up to two or up to three amino acid residues are substituted in H-CDR2. In yet another embodiment up to one, up to two or up to three amino acid residues are substituted in H-CDR3. In one embodiment up to one, up to two or up to three amino acid residues are substituted in L-CDR1. In another embodiment up to one, up to two or up to three amino acid residues are substituted in L-CDR2. In yet another embodiment up to one, up to two or up to three amino acid residues are substituted in L-CDR3.

[0088] Antibodies have been described in the scientific literature in which one or two CDRs can be dispensed with for binding.

[0089] If a CDR or amino acid residue(s) thereof is omitted, it is usually substituted with an amino acid occupying the corresponding position in another human antibody sequence or a consensus of such sequences.

[0090] In one embodiment up to one, up to two or up to three amino acid residues are omitted in HCDR1. In another embodiment up to one, up to two or up to three amino acid residues are omitted in H-CDR2. In yet another embodiment up to one, up to two or up to three amino acid residues are omitted in H-CDR3. In one embodiment up to one, up to two or up to three amino acid residues are omitted in L-CDR1. In another embodiment up to one, up to two or up to three amino acid residues are omitted in L-CDR2. In yet another embodiment up to one, up to two or up to three amino acid residues are omitted in L-CDR3.

[0091] Positions for substitution within CDRs and amino acids to substitute can also be selected empirically. Empirical substitutions can be conservative or non-conservative substitutions.

[0092] In some embodiments also in other parts of the antibody or antigen-fragment thereof amino acids may be exchanged by conservative amino acid substitution. Such a sequence variant, which differs from another sequence only by conservative amino acid substitution(s), is called herein “substantially similar variant”.

[0093] A “conservative amino acid substitution” is one in which an amino acid residue is substituted by another amino acid residue having a side chain (R group) with similar chemical properties (e.g., similar charge or hydrophobicity). In general, a conservative amino acid substitution will not substantially change the functional properties of a protein. In cases where two or more amino acid sequences differ from each other by conservative substitutions, the percent or degree of similarity may be adjusted upwards to correct for the conservative nature of the substitution. Means for making this adjustment are well known to those of skill in the art.

[0094] Examples of groups of amino acids that have side chains with similar chemical properties, and whose substitution for each other constitutes conservative substitutions, include 1) aliphatic side chains: glycine, alanine, valine, leucine and isoleucine; 2) aliphatic hydroxyl side chains: serine and threonine; 3) amide-containing side chains: asparagine and glutamine; 4) aromatic side chains: phenylalanine, tyrosine, and tryptophan; 5) basic side chains: lysine, arginine, and histidine; 6) acidic side chains: aspartate and glutamate, and 7) sulfur-containing side chains: cysteine and methionine. Preferred conservative amino acids substitution groups are: valine-leucineisoleucine, phenylalanine-tyrosine, lysine-arginine, alanine-valine, glutamate-aspartate, and asparagine-glutamine.

[0095] Alternatively, a conservative replacement is any change having a positive value in the PAM250 log-likelihood matrix disclosed in Gonnet et al. (1992) Science 256: 1443 45. A “moderately conservative” replacement is any change having a nonnegative value in the PAM250 log-likelihood matrix.

[0096] Sequence similarity for polypeptides is typically measured using sequence analysis software.

[0097] Protein analysis software matches similar sequences using measures of similarity assigned to various substitutions, deletions and other modifications, including conservative amino acid substitutions.

[0098] For instance, GCG software contains programs such as GAP and BESTFIT which can be used with default parameters to determine sequence homology or sequence identity between closely related polypeptides, such as homologous polypeptides from different species of organisms or between a wild type protein and a mutein thereof.

[0099] Polypeptide sequences also can be compared using FASTA with default or recommended parameters; a program in GCG Version 6.1. FASTA (e.g., FASTA2 and FASTA3) provides alignments and percent sequence identity of the regions of the best overlap between the query and search sequences (Pearson (2000) supra).

[0100] Another preferred algorithm when comparing a sequence of the invention to a database containing a large number of sequences from different organisms is the computer program BLAST, especially BLASTP or TBLASTN, using default parameters. See, e.g., Altschul et al. (1990) J. Mol. Biol. 215: 403 410 and (1997) Nucleic Acids Res. 25:3389 402.

[0101] The term “sequence identity” when referring to a nucleic acid or antigen-binding fragment thereof, indicates that, when optimally aligned with appropriate nucleotide insertions or deletions with another nucleic acid (or its complementary strand), there is nucleotide sequence identity in at least about 90%, and more preferably at least about 95%, at least about 96%, at least about 97%, at least about 98% or at least about 99% of the nucleotide bases, as measured by any well-known algorithm of sequence identity, such as FASTA, BLAST or GAP, as discussed.

[0102] As applied to polypeptides, the term “substantial similarity” or “substantially similar” means that two peptide sequences, when optimally aligned, such as by the programs GAP or BESTFIT using default gap weights, share at least 90% sequence identity, even more preferably at least 95%, at least 98% or at least 99% sequence identity. Preferably, residue positions which are not identical differ by conservative amino acid substitutions.

[0103] In some embodiments, the invention is a monoclonal antibody, a polyclonal antibody, a recombinant antibody, a human antibody, a humanized antibody, a chimeric antibody, a multispecific antibody, or an antigen-binding fragment thereof. In some embodiments, the isolated antigen binding protein is a Fab fragment, a Fab′ fragment, a F(ab′)2 fragment, a Fv fragment, a diabody, a nanobody or a single chain antibody molecule. In some embodiments, the isolated antigen binding protein is of the IgG1-, IgG2-IgG3- or IgG4-type. In some embodiments the antibody may be of IgA-, IgD-, IgE- or IgM-type.

[0104] In one embodiment the invention is a monoclonal antibody of IgG1-Type. In another embodiment the invention is a scFV-fragment.

[0105] The term “human antibody”, as used herein, is intended to include antibodies having variable and constant regions derived from human germline immunoglobulin sequences. The human mAbs of the invention may include amino acid residues not encoded by human germline immunoglobulin sequences (e.g., mutations introduced by random or site-specific mutagenesis in vitro or by somatic mutation in vivo), for example in the CDRs.

[0106] The term “therapeutic” antibody or antigen-binding fragment thereof, as used herein, is intended to differentiate the antibodies of this invention from “regular” antibodies or fragments thereof. Regular antibodies may also bind to the target, but usually they show low affinity, or low specificity, or neutralizing effect, or a combination thereof, to the target, i.e. SARS-CoV-2 glycoprotein S. Regular antibodies may also show other undesired features, such as dimerization or multimerization. Such regular antibodies may be suitable for certain scientific applications, such as assays. However, such regular antibodies must not be used for therapeutic purposes, which necessitate therapeutic antibodies with high affinity, high specificity and/or high neutralizing effects; and which are free of undesired features, such as agglutination, such as dimerization or multimerization, which may lead to an undesired host-response, for example immune-response, after treatment with such antibodies and, therefore, such antibodies are normally not admitted for therapeutic use by the regulatory health authorities.

[0107] The difference in appearance of a therapeutic antibody and a regular antibody as measured by SEC-HLPC is shown in FIGS. 1a and 1b. FIG. 1a depicts a therapeutic antibody which is nearly 100% monomeric free of agglutination, whereas FIG. 1b depicts a regular antibody with dimeric and multimeric peaks. The integral of the curves depicts the amount of monomeric, dimeric and multimeric antibodies. Please note that agglutinations elute quicker from SEC-HPLC than monomers.

[0108] In some embodiments, the therapeutic antibodies or antigen binding fragment thereof should be monomeric antibodies with a contamination with agglutinations of less than 10 mol-%, preferably less than 5 mol-%, more preferably less than 2 mol-%, most preferred less than 1 mol-% of agglutinations such as dimeric and/or multimeric antibodies as measured with size-exclusion chromatography (SEC)-HPLC with PBS at 20° C. according to standard protocol.

[0109] In some embodiments the contamination with agglutinations is “absent”, that is, not measureable with SEC-HPLC (i.e. is between 0-0.25 mol-%).

[0110] In another embodiment the therapeutic antibodies or antigen binding fragment thereof are monomeric antibodies are defined by a “contamination ratio” which is the ratio of the integrals of the HPLC-peak as measured with size-exclusion chromatography (SEC)-HPLC denoting the monomeric antibody (int-mon) and the integrals of the agglutination HPLC-peaks as measured with size-exclusion chromatography (SEC)-HPLC (int-mult) as depicted in Formula I:

$$\frac{int - mult}{int - mon} = contamination ratio \qquad Formula I$$

[0111] In another embodiment the therapeutic antibodies or antigen binding fragment thereof possesses a “contamination ratio” less than 0.2, more preferred of less than 0.1, even more preferred of less than 0.05, even more preferred of less than 0.033, even more preferred of less than 0.02.

[0112] In some embodiments the therapeutic antibodies or antigen binding fragment thereof is monomeric antibodies free of any contamination with dimeric and/or multimeric antibodies as measured with size-exclusion chromatography (SEC)-HPLC with PBS at 20° C. according to standard protocol.

[0113] Dimeric and multimeric antibodies, also summarized with the term “agglutination” may provoke unwanted side-effects during therapy and must be reduced or, preferably, completely avoided.

[0114] Without being bound to theory, the formation of antibody agglutinations during manufacturing, storage and distribution, the exposure of the antibody to different stress conditions such as mechanical stress, light exposure, temperature differences, pH variations and/or contact to different surface materials, may be the result of mal-designed antibodies (e.g. unfavorable charge distribution, unpaired cysteine-residues, unfavorable hydrophobic patches and the like).

[0115] In some embodiments of the present invention the therapeutic antibodies or antigen binding fragment thereof should possess a low “stickiness”. The term “stickiness” means the ability of the antibody to aggregate unspecifically with other antibodies. This “stickiness” can be measured by a “specificity ELISA” as outlined in more detail in the examples-section.

[0116] Preferred antibodies show a mean stickiness against a control-antibody (for example against Avelumab) of less than 0.9, preferably of less than 0.8, more preferably of less than 0.7, even more preferably of less than 0.6; most preferably of less than 0.5 when measured in a specificity ELISA.

[0117] In some embodiments the therapeutic antibodies and antigen-binding fragments thereof possess a stickiness of between 0.4 and 0.75 when measured in a specificity ELISA in comparison to Avelumab.

[0118] Fc mediated effector functions support anti-viral function of antibodies, but they can also cause antibody dependent enhancement (ADE) and other severe adverse effect such as cytokine storms and hyperinflammation.

[0119] Potential adverse effects of active Fc portion of IgG1 are:
[0120] ADE: FcγR binding on phagocytes or other cells may re-target infection (It is possible that non-neutralizing anti-virus antibodies and/or suboptimal concentrations may actually enhance the infection).
[0121] Hyperinflammation and/or cytokine storm: FcγR binding and activation on immune cells may lead to enhancement of inflammatory events associated with the viral infection or underlying diseases.
[0122] Complement activation may lead to endotheliopathy, hypercoagulability, hyperinflammation and cytokine storm.

[0123] COVID-19 is associated with large number of risk factor, mostly underlying diseases (ca. 90% of severe cases in the US). Therefore, antibody drugs with an active Fc portion may cause adverse effects in these cases and safety measures need to be included into the drug and therapy design. Thus, in some embodiments of the present invention, the constant region (Fc-region) of the therapeutic antibody and/or antigen-binding fragment thereof was designed or further amended in order prevent an antibody-dependent enhancement (ADE) and/or cytokine storm syndrome (CSS).

[0124] The term “antibody-dependent enhancement” (ADE), sometimes less precisely called immune enhancement or disease enhancement, is a phenomenon in which binding of a virus to antibodies enhances its entry into host cells, and sometimes also its replication.

[0125] It is believed that some host cells lack the usual receptors on their surfaces that the virus uses to gain entry, but they have Fc receptors that bind to one end of antibodies. The virus binds specifically to the antigen-binding site at the other end, and in this way gains entry to and infects the host cell, potentially increasing the severity of the disease.

[0126] The “cytokine storm”, also called cytokine storm syndrome (CSS), is a bodily reaction in human immune systems in which the innate immune system releases a large number of cytokines, potentially overwhelming the body and possibly leading to acute respiratory distress syndrome (ARDS) and even fatality. It is believed that many severe episodes of COVID-19 are related at least partially to the cytokine storm syndrome.

[0127] The respective modifications which were introduced in the constant region in order to produce “silent Fc”-regions are depicted in table 2. In some embodiments already one, two or three of the depicted modifications may be introduced in order to achieve sufficient silencing.

TABLE 2
Modifications in Fc-region in order to produce silenced Fc.

| | | | | | Effect on | | References |
|---|---|---|---|---|---|---|---|
| Fc mutation | Effect on FcγRs Ratio to wt mean (SD) | | | | complement | FcRn | and remarks |
| Numbering | FcγR1 | FcγR 2A | FcγR 2B | FcγR 3A | | | |
| [3] | | | | | | | |
| E233P | 0.12 (0.06) | 0.08 (0.06) | 0.12 (0.01) | 0.04 (0.02) | ? | 0.54 | [1] from IgG2 |
| L234V | | | | | ? | (0.20) | other mutations |
| L235A | | | | | ? | | at this position |
| AG236 | | | | | ? | | reduce |
| | | | | | | | FcγR binding |
| | | | | | | | (e.g. LALA) |
| D265G | 0.16 (0.05) | 0.07 (0.01) | 0.13 (0.05) | 0.09 (0.06) | Reduced | 1.23 | [1] D265A: 44.7% |
| | | | | | C1q | (0.14) | 1−3 terminal |
| | | | | | binding? | | Gal and higher |
| | | | | | | | sialation |
| | | | | | | | vs wt: 33.9% |
| A327Q | 0.6 (0.12) | 0.13 (0.03) | 0.14 (0.03) | 0.06 (0.01) | ? | 0.97 | [1] similar |
| | | | | | | | A327G [2] |
| A330S | ? | ? | ? | ? | Decreased | ? | [2] from IgG4. |
| | | | | | C1q | | complement |
| | | | | | | | binding |
| Total | 0 | 0 | 0 | 0 | 0 | | |

SD = Standard deviation; wt = wildtype IgG1-Fc
[1] Shields et al.
[2] Armour, KL, Clark, MR, Hadley, AG, and Williamson, LM. Recombinant human IgG molecules lacking Fcγ receptor I binding and monocyte triggering activities Eur. J. Immunol. 1999. 29: 2613-2624.
[3] Kabat, EA, Wu, TT, Perry, HM, Gottesman, KS and Foeller, C, Sequences of proteins of immunological interest. US Department of Health and Human Services, NIH, Bethesda 1991. (EU Numbering system).

[0128] It is obvious to the person skilled in the art, that, whereas regular antibodies may not be used for therapeutic use i.e. in vivo application and/or treatment of patients because of the abovementioned reasons, therapeutic antibodies are suitable also for non-therapeutic use i.e. in vitro assays, and the like.

[0129] The term “antibody fragment”, as used herein, refers to one or more fragments of an antibody that retains the ability to specifically bind to S1-protein and/or RBD.

[0130] An “antibody fragment” may include a Fab fragment, a F(ab′)2 fragment, a Fv fragment (including scFv-fragments), a dAb fragment, a fragment containing a CDR, or an isolated CDR.

[0131] The present invention generally relates to antibodies or antigen-binding fragments thereof capable of specifically blocking and/or inhibiting the interaction between the SARS-CoV-2 spike protein and the ACE receptor, particularly the human ACE receptor, as well as combinations comprising two or more different antibodies or antigen-binding fragments. Specific amino acid sequences of relevant antibody regions are described in the enclosed sequence listing.

[0132] The term “specifically blocking and/or inhibiting the interaction between the SARS-CoV-2 spike protein and the ACE receptor” as used herein, refers to the inhibition of the binding between the S1 domain of the spike protein and an ACE positive cell, particularly when determined as described in the present examples. In particular embodiments, the antibody binds specifically to the S1 domain of the spike protein.

[0133] More particularly, the present invention relates to an antibody or antigen-binding fragment thereof capable of specifically blocking and/or inhibiting the interaction between the SARS-CoV2 spike protein and the human ACE receptor defined by one or more complementarity-determining regions (CDRs) and/or by variable heavy chain (VH) and optionally variable light chain (VL) regions comprising said CDRs or related sequences.

[0134] In some embodiments of the present invention, the antibodies or antigen-binding fragments of the invention are neutralizing.

[0135] A “neutralizing antibody”, as used herein (or an “antibody that neutralizes the infectious activity of SARS-CoV-2”), is intended to refer to an antibody whose binding specifically to the SARS-CoV-2 glycoprotein S, more preferably the S1-subunit and/or RBD results in inhibition of virus infectivity.

[0136] The term “virus infectivity” or “viral infection” as used herein means any viral activity in the host. Viral infection occurs when a host's body is invaded by SARS-CoV-2, and infectious virus particles (virions) attach to and enter susceptible host cells. Thus, the term “virus infectivity” includes viral activities, such as the entry of virus particles into host cells, the replication of the virus within the host cell, the lysis of the host cell and spreading of the virus to further cells. However, “inhibition of virus infectivity” can also mean the prevention, reduction or healing of any disease or condition resulting from a SARS-CoV-2 infection, especially symptoms associated with COVID-19. Such a disease or condition includes one or more symptoms selected from the list comprising fever, cough, fatigue, shortness of breath, loss of smell and taste, pleurisy, pericarditis, lung consolidation, pulmonary oedema, pneumonia, serous exudation, fibrin exudation, pulmonary oedema, pneumocyte hyperplasia, large atypical pneumocytes, interstitial inflammation with lymphocytic infiltration and multinucleated giant cell formation, diffuse alveolar damage (DAD) with diffuse alveolar exudates, acute respiratory distress syndrome (ARDS), severe hypoxemia, exudates in alveolar cavities and pulmonary interstitial fibrosis plasmocytosis in bronchoalveolar lavage (BAL), disseminated intravascular coagulation (DIC), leukoerythroblastic reaction and microvesicular steatosis in the liver and any combination thereof.

[0137] The terms “neutralizing” and “blocking” or “inhibition” are not to be confused with each other. Antibodies exist, which bind to the S1-subunit and/or RBD in such a way that they block/inhibit the binding of the spike-protein to the ACE2-receptor, however, they still may not neutralize the infectious activity of SARS-CoV-2, and, thus, possess no neutralizing activity.

[0138] Only if also at least one infectious activity of the SARS-CoV-2-virus is inhibited, the term “neutralizing” is used herein. This inhibition of the infectious activity can be assessed by measuring one or more indicators of viral activity by one or more of several standard in vitro or in vivo assays known in the art, such as for example the SARS-CoV-2 VERO E6 neutralizing assay, wherein VERO E6 cells are infected with live SARS-CoV-2 virus and the neutralization of the antibody or antigen-binding fragment thereof is measured by the retention of confluence after certain time points.

[0139] VERO E6 cells are commonly used for in vitro studies of the severe acute respiratory syndrome-associated coronavirus (SARS-CoV) and for antiviral evaluation purposes. In these tests the SARS-CoV growth kinetics in VERO E6 cells is used in order to elucidate the mechanism of antiviral activity of selective antiviral agents. The growth kinetics of SARS-CoV in VERO E6 cells can be measured qualitatively (or half-quantitatively) by cell-confluence measurement as outlined above and/or quantitatively by intra- and extracellular viral RNA load as well as extracellular virus yield at different time points post-infection.

[0140] Without virus-neutralizing agents, at 12 h post-infection, the intracellular viral RNA load is about 3×10²-fold higher than at the time of infection, and the extracellular viral RNA load is increased by a factor of about 2×10³. Intracellular viral RNA levels started to rise at 6 h post-infection. One hour later (at 7 h post-infection), the levels of extracellular SARS-CoV RNA also begins to rise. This is corroborated by the fact that infectious progeny SARS-CoV also first appeared in the supernatant between 6 and 7 h post-infection. At 12 h post-infection, SARS-CoV reaches titers in the supernatant of 5.2×10³ CCID₅₀/ml.

[0141] Thus, a “neutralizing antibody or antigen-binding fragment thereof” is any antibody or antigen-binding fragment thereof where confluence in a SARS-CoV-2 VERO E6 neutralizing assay in % at 4 dpi is at least 80%, more preferred at least 85%, even more preferred at least 90%, even more preferred at least 95%, most preferred at least 98% after incubation with a mix comprising at least medium, active SARS-CoV-2 and the neutralizing antibody or antigen-binding fragment thereof. In some embodiments, e.g. see example 9, the viral strain SARS-CoV-2/Münster/FI 110320/1/2020 was used. The skilled person is aware that it is possible to use also other SARS-CoV-2 viral strains with similar infectivity to VERO E6 cells.

[0142] In case of some embodiments the confluence in SARS-CoV-2 VERO E6 neutralizing assay in % at 4 dpi is between 98% and up to 100%, e.g. the same confluence as visible for non-infected VERO E6—cells at the same time-point.

[0143] In some embodiments the time-point is chosen about 3.5 days after the first incubation with SARS-CoV-2, in other embodiments 3 days and 18 hours; in further embodiments 4 days, 5 days and up to 6 days, or 7 days.

[0144] In another embodiment, a “neutralizing antibody or antigen-binding fragment thereof” is any antibody or antigen-binding fragment thereof where extracellular viral RNA load in a SARS-CoV-2 VERO E6 neutralizing assay is reduced by at least 50% as compared to infected cells without treatment with a “neutralizing antibody or antigen-binding fragment thereof”, more preferred at least 75%, even more preferred at least 80%, even more preferred at least 90%, even more preferred at least 95%, even more preferred at least 99%, most preferred 99.9%.

[0145] In another embodiment, a “neutralizing antibody or antigen-binding fragment thereof” is any antibody or antigen-binding fragment thereof where intracellular viral RNA levels in a SARS-CoV-2 VERO E6 neutralizing assay is reduced by at least 50% as compared to infected cells without treatment with a “neutralizing antibody or antigen-binding fragment thereof”, more preferred at least 75%, even more preferred at least 80%, even more preferred at least 90%, even more preferred at least 95%, even more preferred at least 99%, most preferred 99.9%.

[0146] In yet another embodiment, a “neutralizing antibody or antigen-binding fragment thereof” is any antibody or antigen-binding fragment thereof where at 12 h post infection SARS-CoV-2 titers in the supernatant in a SARS-CoV-2 VERO E6 neutralizing assay is reduced by at least 50% as compared to infected cells without treatment with a “neutralizing antibody or antigen-binding fragment thereof”, more preferred at least 75%, even more preferred at least 80%, even more preferred at least 90%, even more preferred at least 95%, even more preferred at least 99%, most preferred 99.9% and/or the virus titration by cell culture infectious dose 50% assay (CCID₅₀/ml) is less than 5×10² CCID₅₀/ml, more preferred less than 1×10² CCID₅₀/ml, 5×10¹ CCID₅₀/ml, or 1×10¹ CCID₅₀/ml.

[0147] Thus, in some embodiments the “antibody that neutralizes S1-subunit and/or RBD activity” inhibits or reduces the interaction, in some embodiments the binding of the S1-subunit and/or RBD to the ACE2-protein on the host cell surface and results in prevention or reduction of entry of virus particles into the host cell.

[0148] In some embodiments, the neutralizing ability in vitro is described in terms of an IC₅₀, value. In case of in vivo neutralizing ability the EC₅₀ is preferred. Thus, the IC₅₀ value indicates the concentration of an inhibitor which is necessary to block 50% of an enzyme, a cell, a cell receptor or a microorganism (in general: “targets”) in vitro. The EC₅₀ value indicates this required concentration in vivo, i.e. for the binding ability to S1/RBD.

[0149] Thus, in yet another embodiment, a “neutralizing antibody or antigen-binding fragment thereof” is any antibody or antigen-binding fragment thereof where the IC₅₀ as measured in the VERO E6 cell assay is less than 0.2 μg/ml, less than 0.1 μg/ml, more preferred less than 0.05 μg/ml even more preferred less than 0.04 μg/ml, even more preferred less than 0.036 μg/ml, even more preferred less than 0.030 μg/ml, most preferred less than 0.026 μg/ml as measured in an infectious VERO E6 cell assay.

[0150] In another embodiment the neutralizing effect of the therapeutic antibody (IC₅₀) is about 0.03672 μg/ml, in yet another embodiment is about 0.03599 μg/ml as measured in an infectious VERO E6 cell assay, in yet another embodiment is about 0.02539 μg/ml as measured in an infectious VERO E6 cell assay.

[0151] In another embodiment the neutralizing effect of the therapeutic antibody (10 50) is less than 1.0 nM, preferably less than 0.85 nM, more preferably less than 0.60 nM, most preferably less than 0.50 nM as measured in an infectious VERO E6 cell assay.

[0152] Further examples for IC₅₀-values of therapeutic antibodies of the present invention are depicted in FIGS. 16 and 17.

[0153] In one embodiment only antibodies with said excellent low IC₅₀-values of less than 0.06 μg/ml even more preferred less than 0.049 μg/ml, even more preferred less than 0.036 μg/ml, most preferred less than 0.026 μg/ml as measured in an infectious VERO E6 cell assay, can be considered “therapeutic antibodies”, since only these antibodies facilitate sufficient neutralizing activity within a patient.

[0154] In certain embodiments, the antibody or antigen-binding fragment has an E0 50 value of about 20 nM or less on RBD, of about 10 nM or less, or of about 5 nM or less for the S1 domain of the spike domain, particularly when determined as described in the present example 9.

[0155] A low IC₅₀ and/or EC₅₀ may result in the beneficial effect that smaller antibody dosages can be administered. This has an effect on the frequency, viscosity and/or volume of the pharmaceutical composition which needs to be administered.

[0156] For example an antibody with a less preferred higher IC₅₀ and/or EC₅₀-value may necessitate a higher frequency of treatment, e.g. instead of once or twice during the whole course of the disease, maybe each day or several times per day.

[0157] It may also result in the effect that the volume per treatment needs to be so high that not a normal syringe or auto-injector, but a large volume device, i.e. pump-device or perfusion needs to be used.

[0158] It may also result in the effect that the administration device needs to be composed of less-breakable material, since due to the high viscosity of the high concentrated antibody composition needs to be applied with elevated pressure.

[0159] Finally, it may also result in the effect that the antibody-composition is not commercially feasible.

[0160] In certain embodiments, the antibody or antigen-binding fragment inhibits the binding specifically to the spike protein with a molar ratio of about 70:1 or less, particularly when determined as described in the present example 3.

[0161] In one embodiment YU536-D04 (SEQ ID NOs: 349-368) is considered such a “therapeutic antibody”, in yet another embodiment YU537-H11 (SEQ ID NOs: 389-408) is considered such a “therapeutic antibody”, in yet another embodiment STE90-C11 (SEQ ID NO: 1305-1312) is considered such a “therapeutic antibody”, in yet another embodiment YU505-A02 (SEQ ID NO: 909-928) is considered such a “therapeutic antibody”.

[0162] Thus, in one embodiment the therapeutic antibody or antigen-binding fragment thereof that binds specifically to SARS-CoV-2 glycoprotein S with the amino acid sequence of SEQ ID NO: 02 and neutralizes the infectious activity of SARS-CoV-2 is selected from the list consisting of:

[0163] YU505-A01 (SEQ ID NOs: 889-908), YU505-A02 (SEQ ID NOs: 909-928), YU505-F05 (SEQ ID NOs: 1149-1168), YU534-C12 (SEQ ID NOs: 169-188), YU534-D09 (SEQ ID NOs: 509 528), YU535-A02 (SEQ ID NOs: 189-208), YU537-H08 (SEQ ID NOs: 769-788), YU537-H11 (SEQ ID NOs: 389-408), YU534-009 (SEQ ID Nos: 149-168), YU536-D04 (SEQ ID NOs: 349-368), YU535-A02 (SEQ ID NOs: 189-208), YU535-006 (SEQ ID NOs: 529-548) and YU505-E01 (SEQ ID NOs: 1049-1068).

[0164] In some embodiments, the antibodies in Table 1 above are strong neutralizers.

[0165] In some embodiments of the present invention, the antibodies or antigen-binding fragments of the invention bind specifically to the target.

[0166] The term “specifically binds” or “binds specifically” or the like, means that an antibody or antigen-binding fragment thereof forms a complex with an antigen that is relatively stable under physiologic conditions. Specific binding can be characterized by an equilibrium dissociation constant of less than 1×10⁻⁶ M, preferably less than 1×10⁻⁷ M, more preferably less than 1×10⁻⁸ M, even more preferably less than 1×10⁻⁹ M; most preferably less than 1×10⁻¹⁰ M or less (e.g., a smaller K_{D} denotes a tighter binding) as measured by affinity chromatography using protein A or surface plasmon resonance, e.g. BIACORE™, biolayer interferometer (BLI), SPRi, solution-affinity ELISA. An isolated antibody or antigen-binding fragment thereof that specifically binds the S1-subunit and/or RBD may, however, still have cross-reactivity to other related antigens, such as the S1-subunit and/or RBD molecules from other species.

[0167] Methods for determining whether two molecules specifically bind are well known in the art and include, for example, equilibrium dialysis, surface plasmon resonance, and the like. An isolated antibody that specifically binds the S1-subunit and/or RBD may, however, exhibit cross-reactivity to other antigens such as S1-subunit and/or RBD molecules from other viral species.

[0168] In some embodiments of the present invention, the antibodies or antigen-binding fragments of the invention bind with high affinity to the target.

[0169] The term “K_{D}”, as used herein, is intended to refer to the equilibrium dissociation constant of a particular antibody-antigen interaction.

[0170] The term “high affinity” antibody refers to those mAbs having a binding affinity K_{D} to S1-protein and/or RBD of less than 1×10⁻⁸ M, preferably of less than 5×10⁻³ M, preferably of less than 1×10⁻³ M, preferably of less than 1×10⁻¹⁰ M; more preferably of less than 10⁻¹¹ M; even more preferably 10⁻¹² M or less, as measured by affinity chromatography using protein A or by surface plasmon resonance (BIACORE™), or by Bio-Layer Interferometry (BLI).

[0171] The terms “fast on rate” or “kₒₙ” or “ka” refer to an antibody or antigen-binding fragment thereof that dissociates from S1-subunit and/or RBD with a rate constant of 1×10⁵ Ms⁻¹ or more, preferably 1×10⁶ Ms⁻¹ or more, as determined by surface plasmon resonance, e.g., BIACORE™.

[0172] The terms “slow off rate” or “k_{off}” or “kd” refer to an antibody or antigen-binding fragment thereof that dissociates from S1-subunit and/or RBD with a rate constant of 1×10⁻³ s⁻¹ or less, preferably 1×10⁻⁴ s⁻¹ or less, as determined by Bio-Layer Interferometry (BLI).

[0173] The term “Bio-Layer Interferometry (BLI)”, as used herein, refers a label-free technology for measuring biomolecular interactions. It is an optical analytical technique that analyzes the interference pattern of white light reflected from two surfaces: a layer of immobilized protein on the biosensor tip, and an internal reference layer. Any change in the number of molecules bound to the biosensor tip causes a shift in the interference pattern that can be measured in real-time.

[0174] The binding between a ligand immobilized on the biosensor tip surface and an analyte in solution produces an increase in optical thickness at the biosensor tip, which results in a wavelength shift, Δλ, which is a direct measure of the change in thickness of the biological layer. Interactions are measured in real time, providing the ability to monitor binding specificity, rates of association and dissociation, or concentration, with high precision and accuracy.

[0175] Only molecules binding specifically to or dissociating from the biosensor can shift the interference pattern and generate a response profile. Unbound molecules, changes in the refractive index of the surrounding medium, or changes in flow rate do not affect the interference pattern. This is a unique characteristic of bio-layer interferometry and extends its capability to perform in crude samples used in applications for protein-protein interactions, quantitation, affinity, and kinetics.

[0176] BLI-systems are commercially available such as for example Octet® QKe (Fortebio/Sartorius GmbH, Göttingen, Germany).

[0177] The term “surface plasmon resonance”, as used herein, refers to an optical phenomenon that allows for the analysis of real-time biospecific interactions by detection of alterations in protein concentrations within a biosensor matrix, for example using the BIACORE™ system.

[0178] An “isolated antibody”, as used herein, is intended to refer to an antibody or antigen-binding fragment thereof that is substantially free of other antibody or antigen-binding fragment thereof having different antigenic specificities (e.g., an isolated antibody that specifically binds the S1-subunit and/or RBD is substantially free of mAbs that specifically bind antigens other than the S1-subunit and/or RBD).

[0179] The term “compete” when used in the context of the antibody or antigen-binding fragment thereof means competition between the reference antibody or antigen-binding fragment thereof in binding specifically to the target protein (also called “antigen”, in the specific case of the invention this is the RBD and/or the S1-subunit of SARS-CoV-2 S protein) with other antigen-binding molecule.

[0180] Such antigen-binding molecule may be selected from the list of: natural ligands to the RBD and/or S1-subunit of SARS-CoV-2 S protein; including ACE2 and fragments thereof; other antibodies or antigen-binding fragments thereof; diabodies, nanobodies, anticalins, scab-proteins, single-chain antibody variable regions, single-chain fragments variables (scFv), etc.

[0181] This competition may be determined by an assay in which the reference antibody or antigen-binding fragment thereof (i.e. one of the reference antibodies mentioned hereinunder) prevents or inhibits (e.g., reduces) specific binding of another antigen-binding molecule, such as for example a test-antibody or antigen-binding fragment thereof and/or ACE2 or fragments thereof, from binding specifically to the RBD of the S1-subunit of the SARS-CoV-2 S protein.

[0182] Numerous types of competitive binding assays can be used to determine if one antigen binding protein competes with another, for example:
[0183] solid phase direct or indirect radioimmunoassay (RIA), solid phase direct or indirect enzyme immunoassay (EIA), sandwich;
[0184] competition assay (see, e.g., Stahli et al., 1983, Methods in Enzymology 9:242-253);
[0185] solid phase direct biotin-avidin EIA (see, e.g., Kirkland et al., 1986, J. Immunol. 137:3614-3619)
[0186] solid phase direct labeled assay;
[0187] solid phase direct labeled sandwich assay (see, e.g., Harlow and Lane, 1988, Antibodies, A Laboratory Manual, Cold Spring Harbor Press);
[0188] solid phase direct label RIA using 1-125 label (see, e.g., Morel et al., 1988, Molec. Immunol. 25:7-15);
[0189] solid phase direct biotin-avidin EIA (see, e.g., Cheung, et al., 1990, Virology 176:546-552); and direct labeled RIA (Moldenhauer et al., 1990, Scand. J. Immunol. 32:77-82).

[0190] Typically, such an assay involves the use of purified RBD and/or S1-subunit of SARS-CoV-2 S protein as “antigen”, bound to a solid surface or cells bearing either of these, an unlabeled test antigen-binding molecule and a labeled reference antigen-binding protein, for example a reference antibody.

[0191] In one embodiment the labeled reference antigen-binding protein may be selected from a group of amino acids depicted in SEQ IDs NO: 906, 908, 926, 928, 1066, 1068, 1166, 1168, or any combination and/or antigen-binding fragment thereof.

[0192] In one embodiment the labeled “reference antibody” is selected from YU505-A02 (SEQ ID NOs: 909-928), YU536-D04 (SEQ ID NOs: 349-368), YU537-H11 (SEQ ID NOs: 389-408) and/or STE90-C11 (SEQ ID NOs: 1305-1312).

[0193] In another embodiment the labeled reference antigen-binding protein may be ACE2 of human or mammalian (e.g. mouse, dog, monkey, bat, pangolin) origin, or any fragment thereof which is still able to bind to the S1-subunit of the SARS-CoV-2 glycoprotein S domain.

[0194] In yet another embodiment the labeled reference antigen-binding protein may be any molecule, protein or any fragment thereof which is able to bind to the S1-subunit of the SARS-CoV-2 glycoprotein S domain, preferably the RBD-domain of SARS-CoV-2 glycoprotein S.

[0195] Competitive inhibition is measured by determining the amount of label bound to the solid surface or cells in the presence of the test antigen binding protein. Usually the antigen binding protein is present in excess.

[0196] Antigen binding proteins identified by competition assay (competing antigen-binding molecules) include antigen binding proteins binding specifically to the same epitope as the reference antigen binding proteins and antigen binding proteins binding specifically to an adjacent epitope sufficiently proximal to the epitope bound by the reference antigen binding protein for steric hindrance to occur.

[0197] Usually, when a competing antigen binding protein is present in excess, it will inhibit (e.g., reduce) specific binding of a reference antigen binding protein to a common antigen by at least 40%, at least 45%, at least 50%, at least 55%, at least 60%, at least 65%, at least 70% or at least 75% or more.

[0198] In some instances, binding is inhibited by at least 80%, at least 85%, at least 90%, at least 95%, or at least 97% or more.

[0199] In one embodiment binding is inhibited by at least 95%.

[0200] The term “epitope” is a region of an antigen that is bound by an antibody. Epitopes may be defined as structural or functional. Functional epitopes are generally a subset of the structural epitopes and have those residues that directly contribute to the affinity of the interaction. Epitopes may also be conformational, that is, composed of non-linear amino acids. In certain embodiments, epitopes may include determinants that are chemically active surface groupings of molecules such as amino acids, sugar side chains, phosphoryl groups, or sulfonyl groups, and, in certain embodiments, may have specific three-dimensional structural characteristics, and/or specific charge characteristics.

[0201] The therapeutic antibodies and antigen-binding fragments thereof of the present invention bind preferably to the RBD-domain of the S1-subunit of the SARS-CoV-2 glycoprotein S. In preferred embodiments the therapeutic antibodies and antigen-binding fragments thereof of the present invention bind both to the RBD-domain as well as the S1-subunit of the SARS-CoV-2 glycoprotein S.

[0202] The reference antibodies which are selected from a group of amino acids depicted in SEQ IDs NO: 906, 908, 926, 928, 1066, 1068, 1166, 1168, or any combination and/or antigen-binding fragment thereof, define a “sweet-spot” for binding specifically to the RDB and/or S1-subunit of the SARS-CoV-2 glycoprotein S.

[0203] In one embodiment the antibodies YU505-A01 (SEQ ID NOs: 889-908), YU505-A02 (SEQ ID NOs: 909-928), YU505-E01 (SEQ ID NOs: 1049-1068) and YU505-F05 (SEQ ID NOs: 1149-1168) have been selected as reference antibodies.

[0204] In a further embodiment the antibodies YU534-009 (SEQ ID Nos: 149-168), YU534-C12 (SEQ ID NOs: 169-188), YU534-D09 (SEQ ID NOs: 509-528), YU535-A02 (SEQ ID NOs: 189 208), YU536-D04 (SEQ ID NOs: 349-368), YU537-H08 (SEQ ID NOs: 769-788) and YU537-H11 (SEQ ID NOs: 389-408), and STE90-C11 (SEQ ID NO: 1305-1312) have been selected as reference antibodies.

[0205] In one embodiment the antibody YU505-A02 (SEQ ID NOs: 909-928) has been selected as reference antibody. That is, any other antibody or antigen-binding fragment thereof which competes with YU505-A02 for binding specifically to the wild-type RBD of SEQ ID No. 06 and/or for binding specifically to the S1-7PM-mutant (SEQ ID NO. 1730) in a competition assay, is considered a therapeutic antibody or antigen-binding fragment thereof of the present invention.

[0206] In other embodiments YU536-D04 (SEQ ID NOs: 349-368) is another preferred reference antibody, in yet another embodiment YU537-H11 (SEQ ID NOs: 389-408) and/or STE90-C11 (SEQ ID NOs: 1305-1312) are preferred reference antibodies.

[0207] Thus, in one embodiment the “reference antibody” is selected from YU505-A02 (SEQ ID NOs: 909-928), YU536-D04 (SEQ ID NOs: 349-368), YU537-H11 (SEQ ID NOs: 389-408) and/or STE90-C11 (SEQ ID NOs: 1305-1312).

[0208] The term “sweet spot” as used herein means an epitope of specific preferred quality with respect to the in one embodiment desired characteristics of the neutralizing antibody or antigen-binding fragment thereof. Thus, the binding specifically to the sweet spot is desired in order to achieve therapeutic antibodies with SARS-CoV-2 neutralizing activity.

[0209] In one embodiment the “sweet spot” comprises the amino acids 437 to 463 of the SARS-CoV-2 S-protein, which sequence is: 437-NSNNLDSKVGGNYNYLYRLFRKSNLKP-463 (SEQ ID NO: 1811).

[0210] Therefore, in one embodiment a therapeutic antibody and/or antigen binding fragment, competes with ACE2 and/or one of the reference antibodies, and/or antigen binding fragment thereof, for binding with at least to one of amino acid to one of the epitopes selected from the group comprising Serine 438, Asparagine 439, Leucine 441, Serine 443, Lysine 444, Valine 445, Glycine 446, Leucine 452, Leucine 455, Phenylalanine 456, Lysine 458, Serine 459, Asparagine 460 and Lysine 462; or any combination thereof, is preferred by this invention.

[0211] In yet another embodiment a therapeutic antibody and/or antigen binding fragment thereof, which competes with ACE2 and/or one of the reference antibodies, and/or antigen binding fragment thereof, for binding with at least to one of amino acid to one of the epitopes selected from the group comprising 445-VGGNYNY-451 (SEQ ID NO: 1812), 445-VGGNYNYLYRL-455 (SEQ ID NO: 1813), 445-VGGNYNYLYRLFRKS-459 (SEQ ID NO: 1814) and 449-YNYLYRLFRKS-459 (SEQ ID NO: 1815), or any combination thereof, is more preferred. In yet another embodiment a therapeutic antibody and/or antigen binding fragment, which competes with ACE2 and/or one of the reference antibodies, and/or antigen binding fragment thereof, for binding with at least to one of amino acid of the epitope 445-VGGNYNY-451 is most preferred.

[0212] In other embodiments a therapeutic antibody, and/or antigen binding fragment thereof is preferred, which does not bind to the “sweet spot”, but competes with ACE2 and/or one of the reference antibodies, and/or antigen binding fragment thereof, for binding with at least to one of amino acid to one of the epitopes selected from the group comprising 342-VFNTRFASVY-351 (SEQ ID NO: 1816), 349-SVYAWNRKRIS-359 (SEQ ID NO: 1817), 485-GFNCYFP-491 (SEQ ID NO: 1818) and 497-FQPTNV-502 (SEQ ID NO: 1819), or any combination thereof.

Properties of the Therapeutic Antibodies and/or Fragments Thereof According to the Present Invention

[0213] In one embodiment the therapeutic antibody has a ACE2:RBD inhibition with 5 μg/ml IgG of between 24.0% and 102.2%. In another embodiment the therapeutic antibody and/or antigen-binding fragment thereof has a virus neutralization at 1 μg/ml IgG of between 96% and 100%. In yet another embodiment the therapeutic antibody and/or antigen-binding fragment thereof has an isoelectric point (pI) of human IgG of between 7.75 and 8.31. In yet another embodiment the therapeutic antibody specifically binds with a K_{D} of between 1×10⁻⁸ and 1×10⁻¹⁰ to an epitope within the RBD and/or S1-subunit. In yet another embodiment the therapeutic antibody and/or antigen-binding fragment thereof has a germinality index VH of between 93.6 and 100%. In yet another embodiment the therapeutic antibody and/or antigen-binding fragment thereof has a germinality index VL of between 95.9 and 100%. In yet another embodiment the therapeutic antibody and/or antigen-binding fragment thereof has a total hydrophobicity score of between 3.41 and 6.02. In yet another embodiment the therapeutic antibody and/or antigen-binding fragment thereof has a CDR hydrophobicity score of between 0.5 and 3.14. In yet another embodiment the therapeutic antibody and/or antigen-binding fragment thereof has a CDR total charge of between −0.48 and −0.85. In yet another embodiment the therapeutic antibody and/or antigen-binding fragment thereof has a T_{m onset} of between 57.1° C. and 65.3° C. In yet another embodiment the therapeutic antibody and/or antigen-binding fragment thereof has a Tₘ₁ of between 60.3° C. and 70.3° C. In yet another embodiment the therapeutic antibody and/or antigen-binding fragment thereof has a Tₘ₂ of between 68.0° C. and 81.9° C. In yet another embodiment the therapeutic antibody and/or antigen-binding fragment thereof has a T_{agg} of between 68.4° C. and 81.2° C. In yet another embodiment the therapeutic antibody shows a “contamination ratio” of less than 0.2 in SEC-HLPC. In yet another embodiment the therapeutic antibody and/or antigen-binding fragment thereof has no unfavourable cysteines and/or glycosylations. In yet another embodiment the therapeutic antibody does not induce ADE or cytokine storm syndrome within a patient.

[0214] In one embodiment the therapeutic antibody and/or antigen-binding fragment thereof has a ACE2:RBD inhibition with 5 μg/ml IgG of between 24.0% and 102.2% and a virus neutralization at 1 μg/ml IgG of between 96% and 100%. In yet another embodiment the therapeutic antibody and/or antigen-binding fragment thereof has an isoelectric point (pI) of human IgG of between 7.75 and 8.31, and specifically binds with a K_{D} of between 1×10⁻⁸ and 1×10⁻¹⁰ to an epitope within the RBD and/or S1-subunit. In yet another embodiment the therapeutic antibody and/or antigen-binding fragment thereof has a germinality index VH of between 93.6 and 100% and a germinality index VL of between 95.9 and 100%. In yet another embodiment the therapeutic antibody and/or antigen-binding fragment thereof has a total hydrophobicity score of between 3.41 and 6.02, a CDR hydrophobicity score of between 0.5 and 3.14 and a CDR total charge of between −0.48 and −0.85. In yet another embodiment the therapeutic antibody and/or antigen-binding fragment thereof has a T_{m onset} of between 57.1° C. and 65.3° C. and a Tₘ₁ of between 60.3° C. and 70.3° C. In yet another embodiment the therapeutic antibody and/or antigen-binding fragment thereof has a Tₘ₂ of between 68.0° C. and 81.9° C. and a T_{agg} of between 68.4° C. and 81.2° C. In yet another embodiment the therapeutic antibody shows a “contamination ratio” of less than 0.2 in SEC-HLPC and has no unfavourable cysteines and/or glycosylations. In yet another embodiment the therapeutic antibody does not induce ADE or cytokine storm syndrome within a patient.

[0215] In one embodiment the therapeutic antibody and/or antigen-binding fragment thereof has a ACE2:RBD inhibition with 5 μg/ml IgG of between 24.0% and 102.2%, a virus neutralization at 1 μg/ml IgG of between 96% and 100%, and an isoelectric point (pI) of human IgG of between 7.75 and 8.31, and specifically binds with a K_{D} of between 1×10⁻⁸ and 1×10⁻¹⁰ to an epitope within the RBD and/or S1-subunit. In yet another embodiment the therapeutic antibody and/or antigen-binding fragment thereof has a germinality index VH of between 93.6 and 100%, a germinality index VL of between 95.9 and 100%, a total hydrophobicity score of between 3.41 and 6.02, a CDR hydrophobicity score of between 0.5 and 3.14, and a CDR total charge of between −0.48 and −0.85. In yet another embodiment the therapeutic antibody and/or antigen-binding fragment thereof has a T_{m onset} of between 57.1° C. and 65.3° C., a Tₘ₁ of between 60.3° C. and 70.3° C., a Tₘ₂ of between 68.0° C. and 81.9° C., and a T_{agg} of between 68.4° C. and 81.2° C. In yet another embodiment the therapeutic antibody shows a “contamination ratio” of less than 0.2 in SEC-HLPC, has no unfavourable cysteines and/or glycosylations and does not induce ADE or cytokine storm syndrome within a patient.

[0216] In one embodiment the therapeutic antibody and/or antigen-binding fragment thereof has a ACE2:RBD inhibition with 5 μg/ml IgG of between 24.0% and 102.2%, a virus neutralization at 1 μg/ml IgG of between 96% and 100%, an isoelectric point (pI) of human IgG of between 7.75 and 8.31, specifically binds with a K_{D} of between 1×10⁻⁸ and 1×10⁻¹⁰ to an epitope within the RBD and/or S1-subunit, has a germinality index VH of between 93.6 and 100%, a germinality index VL of between 95.9 and 100%, a total hydrophobicity score of between 3.41 and 6.02, a CDR hydrophobicity score of between 0.5 and 3.14, a CDR total charge of between −0.48 and −0.85, a T_{m onset} of between 57.1° C. and 65.3° C., a Tₘ₁ of between 60.3° C. and 70.3° C., a Tₘ₂ of between 68.0° C. and 81.9° C., and a T_{agg} of between 68.4° C. and 81.2° C., shows a “contamination ratio” of less than 0.2 in SEC-HLPC, has no unfavourable cysteines and/or glycosylations and does not induce ADE or cytokine storm syndrome within a patient.

Properties of the Therapeutic Antibodies and/or Fragments Thereof According to the Present Invention

[0217] In one embodiment the therapeutic antibody has a ACE2:RBD inhibition with 5 μg/ml IgG of about 102.2%. In another embodiment the therapeutic antibody and/or antigen-binding fragment thereof has a virus neutralization at 1 μg/ml IgG of at least 99%. In yet another embodiment the therapeutic antibody and/or antigen-binding fragment thereof has an isoelectric point (pI) of human IgG of about 8.11. In yet another embodiment the therapeutic antibody specifically binds with a K_{D} of 3.41×10⁻⁹ to an epitope within the RBD and/or S1-subunit. In yet another embodiment the therapeutic antibody and/or antigen-binding fragment thereof has a germinality index VH of about 100%. In yet another embodiment the therapeutic antibody and/or antigen-binding fragment thereof has a germinality index VL of about 98%. In yet another embodiment the therapeutic antibody and/or antigen-binding fragment thereof has a total hydrophobicity score of about 3.41. In yet another embodiment the therapeutic antibody and/or antigen-binding fragment thereof has a CDR hydrophobicity score of about 0.5. In yet another embodiment the therapeutic antibody and/or antigen-binding fragment thereof has a CDR total charge of about −0.58. In yet another embodiment the therapeutic antibody and/or antigen-binding fragment thereof has a T_{m onset} of at least 61.6° C. In yet another embodiment the therapeutic antibody and/or antigen-binding fragment thereof has a Tₘ₁ of at least 68.8° C. In yet another embodiment the therapeutic antibody and/or antigen-binding fragment thereof has a Tₘ₂ of at least 81.9° C. In yet another embodiment the therapeutic antibody and/or antigen-binding fragment thereof has a T_{agg} of at least 71.3° C. In yet another embodiment the therapeutic antibody shows no multimer or dimer peak in SEC-HLPC. In yet another embodiment the therapeutic antibody and/or antigen-binding fragment thereof has no unfavourable cysteines and/or glycosylations. In yet another embodiment the therapeutic antibody does not induce ADE or cytokine storm syndrome within a patient.

[0218] In yet another embodiment the therapeutic antibody and/or antigen-binding fragment thereof has a ACE2:RBD inhibition with 5 μg/ml IgG of about 102.2% and a virus neutralization at 1 μg/ml IgG of at least 99%. In yet another embodiment the therapeutic antibody and/or antigen-binding fragment thereof has an isoelectric point (pI) of human IgG of about 8.11 and specifically binds with a K_{D} of 3.41×10⁻⁹ to an epitope within the RBD and/or S1-subunit. In yet another embodiment the therapeutic antibody and/or antigen-binding fragment thereof has a germinality index VH of about 100% and a germinality index VL of about 98%. In yet another embodiment the therapeutic antibody and/or antigen-binding fragment thereof has a total hydrophobicity score of about 3.41 and a CDR hydrophobicity score of about 0.5 and a CDR total charge of about −0.58. In yet another embodiment the therapeutic antibody and/or antigen-binding fragment thereof has a T_{m onset} of at least 61.6° C., a Tₘ₁ of at least 68.8° C., a Tₘ₂ of at least 81.9° C. and a T_{agg} of at least 71.3° C. In yet another embodiment the therapeutic antibody shows no multimer or dimer peak in SEC-HLPC, no unfavourable cysteines and/or glycosylations and does not induce ADE or cytokine storm syndrome within a patient.

[0219] In yet another embodiment the therapeutic antibody and/or antigen-binding fragment thereof has a ACE2:RBD inhibition with 5 μg/ml IgG of about 102.2%, a virus neutralization at 1 μg/ml IgG of at least 99% and an isoelectric point (pI) of human IgG of about 8.11, and specifically binds with a K_{D} of 3.41×10⁻⁹ to an epitope within the RBD and/or S1-subunit. In yet another embodiment the therapeutic antibody and/or antigen-binding fragment thereof has a germinality index VH of about 100%, a germinality index VL of about 98%, a total hydrophobicity score of about 3.41 and a CDR hydrophobicity score of about 0.5 and a CDR total charge of about −0.58. In yet another embodiment the therapeutic antibody and/or antigen-binding fragment thereof has a T_{m onset} of at least 61.6° C., a Tₘ₁ of at least 68.8° C., a Tₘ₂ of at least 81.9° C. and a T_{agg} of at least 71.3° C., and shows no multimer or dimer peak in SEC-HLPC, no unfavourable cysteines and/or glycosylations and does not induce ADE or cytokine storm syndrome within a patient.

[0220] In yet another embodiment the therapeutic antibody and/or antigen-binding fragment thereof has a ACE2:RBD inhibition with 5 μg/ml IgG of about 102.2%, a virus neutralization at 1 μg/ml IgG of at least 99%, an isoelectric point (pI) of human IgG of about 8.11, specifically binds with a K_{D} of 3.41×10⁻⁹ to an epitope within the RBD and/or S1-subunit, has a germinality index VH of about 100%, a germinality index VL of about 98%, a total hydrophobicity score of about 3.41, a CDR hydrophobicity score of about 0.5, a CDR total charge of about −0.58, a T_{m onset} of at least 61.6° C., a Tₘ₁ of at least 68.8° C., a Tₘ₂ of at least 81.9° C. and a T_{agg} of at least 71.3° C., shows no multimer or dimer peak in SEC-HLPC, no unfavourable cysteines and/or glycosylations and does not induce ADE or cytokine storm syndrome within a patient.

[0221] In one embodiment the therapeutic antibody has a ACE2:RBD inhibition with 5 μg/ml IgG of about 43.2%. In another embodiment the therapeutic antibody and/or antigen-binding fragment thereof has a virus neutralization at 1 μg/ml IgG of at least 100%. In yet another embodiment the therapeutic antibody and/or antigen-binding fragment thereof has an isoelectric point (pI) of human IgG of about 7.75. In yet another embodiment the therapeutic antibody specifically binds with a K_{D} of 1.07×10⁻⁸ to an epitope within the RBD and/or S1-subunit. In yet another embodiment the therapeutic antibody and/or antigen-binding fragment thereof has a germinality index VH of about 99.1%. In yet another embodiment the therapeutic antibody and/or antigen-binding fragment thereof has a germinality index VL of about 100%. In yet another embodiment the therapeutic antibody and/or antigen-binding fragment thereof has a total hydrophobicity score of about 6.02. In yet another embodiment the therapeutic antibody and/or antigen-binding fragment thereof has a CDR hydrophobicity score of about 3.14. In yet another embodiment the therapeutic antibody and/or antigen-binding fragment thereof has a CDR total charge of about −0.63. In yet another embodiment the therapeutic antibody and/or antigen-binding fragment thereof has a T_{m onset} Of at least 60.1° C. In yet another embodiment the therapeutic antibody and/or antigen-binding fragment thereof has a Tₘ₁ of at least 70.0° C. In yet another embodiment the therapeutic antibody and/or antigen-binding fragment thereof has a Tₘ₂ of at least 79.7° C. In yet another embodiment the therapeutic antibody and/or antigen-binding fragment thereof has a T_{agg} of at least 78.6° C. In yet another embodiment the therapeutic antibody shows no multimer or dimer peak in SEC-HLPC. In yet another embodiment the therapeutic antibody and/or antigen-binding fragment thereof has no unfavourable cysteines and/or glycosylations. In yet another embodiment the therapeutic antibody does not induce ADE or cytokine storm syndrome within a patient.

[0222] In yet another embodiment the therapeutic antibody and/or antigen-binding fragment thereof has a ACE2:RBD inhibition with 5 μg/ml IgG of about 43.2% and a virus neutralization at 1 μg/ml IgG of at least 100%. In yet another embodiment the therapeutic antibody and/or antigen-binding fragment thereof has an isoelectric point (pI) of human IgG of about 7.75 and specifically binds with a K_{D} of 1.07×10⁻⁸ to an epitope within the RBD and/or S1-subunit. In yet another embodiment the therapeutic antibody and/or antigen-binding fragment thereof has a germinality index VH of about 99.1% and a germinality index VL of about 100%. In yet another embodiment the therapeutic antibody and/or antigen-binding fragment thereof has a total hydrophobicity score of about 6.02 and a CDR hydrophobicity score of about 3.14 and a CDR total charge of about −0.63. In yet another embodiment the therapeutic antibody and/or antigen-binding fragment thereof has a T_{m onset} of at least 60.1° C. and a Tₘ₁ of at least 70.0° C. In yet another embodiment the therapeutic antibody and/or antigen-binding fragment thereof has a Tₘ₂ of at least 79.7° C. and a T_{agg} of at least 78.6° C. In yet another embodiment the therapeutic antibody shows a “contamination ratio” of less than 0.2 in SEC-HLPC and has no unfavourable cysteines and/or glycosylations and does not induce ADE or cytokine storm syndrome within a patient.

[0223] In yet another embodiment the therapeutic antibody and/or antigen-binding fragment thereof has a ACE2:RBD inhibition with 5 μg/ml IgG of about 43.2%, a virus neutralization at 1 μg/ml IgG of at least 100%, an isoelectric point (pI) of human IgG of about 7.75 and specifically binds with a K_{D} of 1.07×10⁻⁸ to an epitope within the RBD and/or S1-subunit. In yet another embodiment the therapeutic antibody and/or antigen-binding fragment thereof has a germinality index VH of about 99.1%, a germinality index VL of about 100%, a total hydrophobicity score of about 6.02, a CDR hydrophobicity score of about 3.14 and a CDR total charge of about −0.63. In yet another embodiment the therapeutic antibody and/or antigen-binding fragment thereof has a T_{m onset} of at least 60.1° C., a Tₘ₁ of at least 70.0° C., a Tₘ₂ of at least 79.7° C. and a T_{agg} of at least 78.6° C., and shows a “contamination ratio” of less than 0.2 in SEC-HLPC and has no unfavourable cysteines and/or glycosylations and does not induce ADE or cytokine storm syndrome within a patient.

[0224] In yet another embodiment the therapeutic antibody and/or antigen-binding fragment thereof has a ACE2:RBD inhibition with 5 μg/ml IgG of about 43.2%, a virus neutralization at 1 μg/ml IgG of at least 100%, an isoelectric point (pI) of human IgG of about 7.75, specifically binds with a K_{D} of 1.07×10⁻⁸ to an epitope within the RBD and/or S1-subunit, has a germinality index VH of about 99.1%, a germinality index VL of about 100%, a total hydrophobicity score of about 6.02, a CDR hydrophobicity score of about 3.14 and a CDR total charge of about −0.63, a T_{m onset} of at least 60.1° C., a Tₘ₁ of at least 70.0° C., a Tₘ₂ of at least 79.7° C., a T_{agg} of at least 78.6° C., shows a “contamination ratio” of less than 0.2 in SEC-HLPC, has no unfavourable cysteines and/or glycosylations and does not induce ADE or cytokine storm syndrome within a patient.

[0225] In one embodiment the therapeutic antibody has a ACE2:RBD inhibition with 5 μg/ml IgG of about 24.0%. In another embodiment the therapeutic antibody and/or antigen-binding fragment thereof has a virus neutralization at 1 μg/ml IgG of at least 97%. In yet another embodiment the therapeutic antibody and/or antigen-binding fragment thereof has an isoelectric point (pI) of human IgG of about 7.88. In yet another embodiment the therapeutic antibody specifically binds with a K_{D} of 4.84×10⁻⁹ to an epitope within the RBD and/or S1-subunit. In yet another embodiment the therapeutic antibody and/or antigen-binding fragment thereof has a germinality index VH of about 93.6%. In yet another embodiment the therapeutic antibody and/or antigen-binding fragment thereof has a germinality index VL of about 97%. In yet another embodiment the therapeutic antibody and/or antigen-binding fragment thereof has a total hydrophobicity score of about 5.18. In yet another embodiment the therapeutic antibody and/or antigen-binding fragment thereof has a CDR hydrophobicity score of about 1.86. In yet another embodiment the therapeutic antibody and/or antigen-binding fragment thereof has a CDR total charge of about −0.85. In yet another embodiment the therapeutic antibody and/or antigen-binding fragment thereof has a T_{m onset} of at least 57.1° C. In yet another embodiment the therapeutic antibody and/or antigen-binding fragment thereof has a Tₘ₁ of at least 60.3° C. In yet another embodiment the therapeutic antibody and/or antigen-binding fragment thereof has a Tₘ₂ of at least 68.2° C. In yet another embodiment the therapeutic antibody and/or antigen-binding fragment thereof has a T_{agg} of at least 68.4° C. In yet another embodiment the therapeutic antibody shows no multimer or dimer peak in SEC-HLPC. In yet another embodiment the therapeutic antibody and/or antigen-binding fragment thereof has no unfavourable cysteines and/or glycosylations. In yet another embodiment the therapeutic antibody does not induce ADE or cytokine storm syndrome within a patient.

[0226] In yet another embodiment the therapeutic antibody and/or antigen-binding fragment thereof has a ACE2:RBD inhibition with 5 μg/ml IgG of about 24.0% and a virus neutralization at 1 μg/ml IgG of at least 97%. In yet another embodiment the therapeutic antibody and/or antigen-binding fragment thereof has an isoelectric point (pI) of human IgG of about 7.88 and specifically binds with a K_{D} of 4.84×10⁻⁹ to an epitope within the RBD and/or S1-subunit. In yet another embodiment the therapeutic antibody and/or antigen-binding fragment thereof has a germinality index VH of about 93.6% and a germinality index VL of about 97%. In yet another embodiment the therapeutic antibody and/or antigen-binding fragment thereof has a total hydrophobicity score of about 5.18, a CDR hydrophobicity score of about 1.86 and a CDR total charge of about −0.85. In yet another embodiment the therapeutic antibody and/or antigen-binding fragment thereof has a T_{m onset} of at least 57.1° C. and a Tₘ₁ of at least 60.3° C. In yet another embodiment the therapeutic antibody and/or antigen-binding fragment thereof has a Tₘ₂ of at least 68.2° C. and a T_{agg} of at least 68.4° C. In yet another embodiment the therapeutic antibody shows no multimer or dimer peak in SEC-HLPC, has no unfavourable cysteines and/or glycosylations and does not induce ADE or cytokine storm syndrome within a patient.

[0227] In yet another embodiment the therapeutic antibody and/or antigen-binding fragment thereof has a ACE2:RBD inhibition with 5 μg/ml IgG of about 24.0%, a virus neutralization at 1 μg/ml IgG of at least 97%, an isoelectric point (pI) of human IgG of about 7.88 and specifically binds with a K_{D} of 4.84×10⁻⁹ to an epitope within the RBD and/or S1-subunit. In yet another embodiment the therapeutic antibody and/or antigen-binding fragment thereof has a germinality index VH of about 93.6%, a germinality index VL of about 97%, a total hydrophobicity score of about 5.18, a CDR hydrophobicity score of about 1.86 and a CDR total charge of about −0.85. In yet another embodiment the therapeutic antibody and/or antigen-binding fragment thereof has a T_{m onset} of at least 57.1° C., a Tₘ₁ of at least 60.3° C., a Tₘ₂ of at least 68.2° C. and a T_{agg} of at least 68.4° C., and shows no multimer or dimer peak in SEC-HLPC, has no unfavourable cysteines and/or glycosylations and does not induce ADE or cytokine storm syndrome within a patient.

[0228] In yet another embodiment the therapeutic antibody and/or antigen-binding fragment thereof has a ACE2:RBD inhibition with 5 μg/ml IgG of about 24.0%, a virus neutralization at 1 μg/ml IgG of at least 97%, an isoelectric point (pI) of human IgG of about 7.88, specifically binds with a K_{D} of 4.84×10⁻⁹ to an epitope within the RBD and/or S1-subunit, has a germinality index VH of about 93.6%, a germinality index VL of about 97%, a total hydrophobicity score of about 5.18, a CDR hydrophobicity score of about 1.86, a CDR total charge of about −0.85, a T_{m onset} of at least 57.1° C., a Tₘ₁ of at least 60.3° C., a Tₘ₂ of at least 68.2° C., a T_{agg} of at least 68.4° C., and shows no multimer or dimer peak in SEC-HLPC, has no unfavourable cysteines and/or glycosylations and does not induce ADE or cytokine storm syndrome within a patient.

[0229] In one embodiment the therapeutic antibody has a ACE2:RBD inhibition with 5 μg/ml IgG of about 26.7%. In another embodiment the therapeutic antibody and/or antigen-binding fragment thereof has a virus neutralization at 1 μg/ml IgG of at least 96%. In yet another embodiment the therapeutic antibody and/or antigen-binding fragment thereof has an isoelectric point (pI) of human IgG of about 8.31. In yet another embodiment the therapeutic antibody specifically binds with a K_{D} of 1.31×10⁻⁸ to an epitope within the RBD and/or S1-subunit. In yet another embodiment the therapeutic antibody and/or antigen-binding fragment thereof has a germinality index VH of about 93.6%. In yet another embodiment the therapeutic antibody and/or antigen-binding fragment thereof has a germinality index VL of about 95.9%. In yet another embodiment the therapeutic antibody and/or antigen-binding fragment thereof has a total hydrophobicity score of about 4.5. In yet another embodiment the therapeutic antibody and/or antigen-binding fragment thereof has a CDR hydrophobicity score of about 0.44. In yet another embodiment the therapeutic antibody and/or antigen-binding fragment thereof has a CDR total charge of about −0.48. In yet another embodiment the therapeutic antibody and/or antigen-binding fragment thereof has a T_{m onset} of at least 57.3° C. In yet another embodiment the therapeutic antibody and/or antigen-binding fragment thereof has a Tₘ₁ of at least 64.5° C. In yet another embodiment the therapeutic antibody and/or antigen-binding fragment thereof has a Tₘ₂ of at least 81.6° C. In yet another embodiment the therapeutic antibody and/or antigen-binding fragment thereof has a T_{agg} of at least 69.5° C. In yet another embodiment the therapeutic antibody shows a “contamination ratio” of less than 0.2 in SEC-HLPC. In yet another embodiment the therapeutic antibody and/or antigen-binding fragment thereof has no unfavourable cysteines and/or glycosylations. In yet another embodiment the therapeutic antibody does not induce ADE or cytokine storm syndrome within a patient.

[0230] In yet another embodiment the therapeutic antibody and/or antigen-binding fragment thereof has a ACE2:RBD inhibition with 5 μg/ml IgG of about 26.7% and a virus neutralization at 1 μg/ml IgG of at least 96%. In yet another embodiment the therapeutic antibody and/or antigen-binding fragment thereof has an isoelectric point (pI) of human IgG of about 8.31 and specifically binds with a K_{D} of 1.31×10⁻⁸ to an epitope within the RBD and/or S1-subunit. In yet another embodiment the therapeutic antibody and/or antigen-binding fragment thereof has a germinality index VH of about 93.6% and a germinality index VL of about 95.9%. In yet another embodiment the therapeutic antibody and/or antigen-binding fragment thereof has a total hydrophobicity score of about 4.5, a CDR hydrophobicity score of about 0.44 and a CDR total charge of about −0.48. In yet another embodiment the therapeutic antibody and/or antigen-binding fragment thereof has a T_{m onset} of at least 57.3° C. and a Tₘ₁ of at least 64.5° C. In yet another embodiment the therapeutic antibody and/or antigen-binding fragment thereof has a Tₘ₂ of at least 81.6° C. and a T_{agg} of at least 69.5° C. In yet another embodiment the therapeutic antibody shows a “contamination ratio” of less than 0.2 in SEC-HLPC, has no unfavourable cysteines and/or glycosylations and does not induce ADE or cytokine storm syndrome within a patient.

[0231] In yet another embodiment the therapeutic antibody and/or antigen-binding fragment thereof has a ACE2:RBD inhibition with 5 μg/ml IgG of about 26.7%, a virus neutralization at 1 μg/ml IgG of at least 96%, an isoelectric point (pI) of human IgG of about 8.31 and specifically binds with a K_{D} of 1.31×10⁻⁸ to an epitope within the RBD and/or S1-subunit. In yet another embodiment the therapeutic antibody and/or antigen-binding fragment thereof has a germinality index VH of about 93.6%, a germinality index VL of about 95.9%, a total hydrophobicity score of about 4.5, a CDR hydrophobicity score of about 0.44 and a CDR total charge of about −0.48. In yet another embodiment the therapeutic antibody and/or antigen-binding fragment thereof has a T_{m onset} of at least 57.3° C., a Tₘ₁ of at least 64.5° C., a Tₘ₂ of at least 81.6° C. and a T_{agg} of at least 69.5° C., shows a “contamination ratio” of less than 0.2 in SEC-HLPC, has no unfavourable cysteines and/or glycosylations and does not induce ADE or cytokine storm syndrome within a patient.

[0232] In yet another embodiment the therapeutic antibody and/or antigen-binding fragment thereof has a ACE2:RBD inhibition with 5 μg/ml IgG of about 26.7% and a virus neutralization at 1 μg/ml IgG of at least 96%, has an isoelectric point (pI) of human IgG of about 8.31, specifically binds with a K_{D} of 1.31×10⁻⁸ to an epitope within the RBD and/or S1-subunit. has a germinality index VH of about 93.6%, a germinality index VL of about 95.9%, a total hydrophobicity score of about 4.5, a CDR hydrophobicity score of about 0.44, a CDR total charge of about −0.48, a T_{m onset} of at least 57.3° C., a Tₘ₁ of at least 64.5° C., a Tₘ₂ of at least 81.6° C., a T_{agg} of at least 69.5° C. and shows a “contamination ratio” of less than 0.2 in SEC-HLPC, has no unfavourable cysteines and/or glycosylations and does not induce ADE or cytokine storm syndrome within a patient.

[0233] In one embodiment the therapeutic antibodies show a T_{m onset} above 60° C., more preferred above 65° C., most preferred above 70° C. In another embodiment the therapeutic antibodies show a Tₘ₁ above 60° C., more preferred above 65° C., most preferred above 70° C. In another embodiment the therapeutic antibodies show a Tₘ₂ above 70° C., more preferred above 75° C., most preferred above 80° C. In another embodiment the therapeutic antibodies show a T_{agg} above 70° C., more preferred above 75° C., most preferred above 80° C.

[0234] In one embodiment the therapeutic antibody has a ACE2:RBD inhibition of the scFV of 87%. In yet another embodiment the therapeutic antibody and/or antigen-binding fragment thereof has an isoelectric point (pI) of human IgG of 8.11. In yet another embodiment the therapeutic antibody and/or antigen-binding fragment thereof has a germinality index VH of 96.3%. In yet another embodiment the therapeutic antibody and/or antigen-binding fragment thereof has a germinality index VL of 99%. In yet another embodiment the therapeutic antibody and/or antigen-binding fragment thereof has a total hydrophobicity score of 4.64. In yet another embodiment the therapeutic antibody and/or antigen-binding fragment thereof has a CDR hydrophobicity score of 1.29. In yet another embodiment the therapeutic antibody and/or antigen-binding fragment thereof has an scFv charge of 0.82. In yet another embodiment the therapeutic antibody and/or antigen-binding fragment thereof has a CDR total charge of −0.19. In yet another embodiment the therapeutic antibody and/or antigen-binding fragment thereof has a T_{m onset} of about 63.7° C. In yet another embodiment the therapeutic antibody and/or antigen-binding fragment thereof has a Tₘ₁ of about 70.8° C. In yet another embodiment the therapeutic antibody and/or antigen-binding fragment thereof has a T_{agg} of about 71.7° C. In yet another embodiment the therapeutic antibody shows a “contamination ratio” of less than 0.2 in SEC-HLPC. In yet another embodiment the therapeutic antibody and/or antigen-binding fragment thereof has no unfavourable cysteines and/or glycosylations. In yet another embodiment the therapeutic antibody does not induce ADE or cytokine storm syndrome within a patient.

[0235] In one embodiment the therapeutic antibody and/or antigen-binding fragment thereof has a ACE2:RBD inhibition of the scFV of 87% and has an isoelectric point (pI) of human IgG of 8.11. In yet another embodiment the therapeutic antibody and/or antigen-binding fragment thereof has a germinality index VH of 96.3% and a germinality index VL of 99%. In yet another embodiment the therapeutic antibody and/or antigen-binding fragment thereof has a total hydrophobicity score of 4.64 and a CDR hydrophobicity score of 1.29. In yet another embodiment the therapeutic antibody and/or antigen-binding fragment thereof has an scFv charge of 0.82 and a CDR total charge of −0.19. In yet another embodiment the therapeutic antibody and/or antigen-binding fragment thereof has a T_{m onset} of about 63.7° C., a Tₘ₁ of about 70.8° C. and a T_{agg} of about 71.7° C. In yet another embodiment the therapeutic antibody shows a “contamination ratio” of less than 0.2 in SEC-HLPC and no unfavourable cysteines and/or glycosylations. In yet another embodiment the therapeutic antibody does not induce ADE or cytokine storm syndrome within a patient.

[0236] In one embodiment the therapeutic antibody and/or antigen-binding fragment thereof has a ACE2:RBD inhibition of the scFV of 87%, an isoelectric point (pI) of human IgG of 8.11, a germinality index VH of 96.3% and a germinality index VL of 99%. In yet another embodiment the therapeutic antibody and/or antigen-binding fragment thereof has a total hydrophobicity score of 4.64, a CDR hydrophobicity score of 1.29, an scFv charge of 0.82 and a CDR total charge of −0.19. In yet another embodiment the therapeutic antibody and/or antigen-binding fragment thereof has a T_{m onset} of about 63.7° C., a Tₘ₁ of about 70.8° C. and a T_{agg} of about 71.7° C., shows a “contamination ratio” of less than 0.2 in SEC-HLPC, no unfavourable cysteines and/or glycosylations and does not induce ADE or cytokine storm syndrome within a patient.

[0237] In one embodiment the therapeutic antibody and/or antigen-binding fragment thereof has a ACE2:RBD inhibition of the scFV of 87%, an isoelectric point (pI) of human IgG of 8.11, a germinality index VH of 96.3%, a germinality index VL of 99%, a total hydrophobicity score of 4.64, a CDR hydrophobicity score of 1.29, an scFv charge of 0.82, a CDR total charge of −0.19, a T_{m onset} of about 63.7° C., a Tₘ₁ of about 70.8° C., a T_{agg} of about 71.7° C., shows a “contamination ratio” of less than 0.2 in SEC-HLPC, no unfavourable cysteines and/or glycosylations and does not induce ADE or cytokine storm syndrome within a patient.

[0238] In one embodiment the therapeutic antibody has a ACE2:RBD inhibition of the scFV of 27%. In yet another embodiment the therapeutic antibody and/or antigen-binding fragment thereof has an isoelectric point (pI) of human IgG of 8.11. In yet another embodiment the therapeutic antibody and/or antigen-binding fragment thereof has a germinality index VH of 84.4.3%. In yet another embodiment the therapeutic antibody and/or antigen-binding fragment thereof has a germinality index VL of 100%. In yet another embodiment the therapeutic antibody and/or antigen-binding fragment thereof has a total hydrophobicity score of 5.08. In yet another embodiment the therapeutic antibody and/or antigen-binding fragment thereof has a CDR hydrophobicity score of 2.09. In yet another embodiment the therapeutic antibody and/or antigen-binding fragment thereof has an scFv charge of 0.18. In yet another embodiment the therapeutic antibody and/or antigen-binding fragment thereof has a CDR total charge of −0.83. In yet another embodiment the therapeutic antibody shows a “contamination ratio” of less than 0.2 in SEC-HLPC. In yet another embodiment the therapeutic antibody and/or antigen-binding fragment thereof has no unfavourable cysteines and/or glycosylations. In yet another embodiment the therapeutic antibody does not induce ADE or cytokine storm syndrome within a patient.

[0239] In one embodiment the therapeutic antibody and/or antigen-binding fragment thereof has a ACE2:RBD inhibition of the scFV of 27% and an isoelectric point (pI) of human IgG of 8.11. In yet another embodiment the therapeutic antibody and/or antigen-binding fragment thereof has a germinality index VH of 84.4.3% and a germinality index VL of 100%. In yet another embodiment the therapeutic antibody and/or antigen-binding fragment thereof has a total hydrophobicity score of 5.08 and a CDR hydrophobicity score of 2.09. In yet another embodiment the therapeutic antibody and/or antigen-binding fragment thereof has an scFv charge of 0.18 and a CDR total charge of −0.83. In yet another embodiment the therapeutic antibody shows a “contamination ratio” of less than 0.2 in SEC-HLPC and no unfavourable cysteines and/or glycosylations. In yet another embodiment the therapeutic antibody does not induce ADE or cytokine storm syndrome within a patient.

[0240] In one embodiment the therapeutic antibody and/or antigen-binding fragment thereof has a ACE2:RBD inhibition of the scFV of 27%, an isoelectric point (pI) of human IgG of 8.11, a germinality index VH of 84.4.3% and a germinality index VL of 100%. In yet another embodiment the therapeutic antibody and/or antigen-binding fragment thereof has a total hydrophobicity score of 5.08, a CDR hydrophobicity score of 2.09, an scFv charge of 0.18 and a CDR total charge of −0.83. In yet another embodiment the therapeutic antibody shows a “contamination ratio” of less than 0.2 in SEC-HLPC, no unfavourable cysteines and/or glycosylations and does not induce ADE or cytokine storm syndrome within a patient.

[0241] In one embodiment the therapeutic antibody and/or antigen-binding fragment thereof has a ACE2:RBD inhibition of the scFV of 27%, an isoelectric point (pI) of human IgG of 8.11, a germinality index VH of 84.4.3%, a germinality index VL of 100%, a total hydrophobicity score of 5.08, a CDR hydrophobicity score of 2.09, an scFv charge of 0.18, a CDR total charge of −0.83, shows a “contamination ratio” of less than 0.2 in SEC-HLPC, no unfavourable cysteines and/or glycosylations and does not induce ADE or cytokine storm syndrome within a patient.

[0242] In one embodiment the therapeutic antibody has a ACE2:RBD inhibition of the scFV of 49%. In yet another embodiment the therapeutic antibody and/or antigen-binding fragment thereof has an isoelectric point (pI) of human IgG of 8.39. In yet another embodiment the therapeutic antibody and/or antigen-binding fragment thereof has a germinality index VH of 95.4%. In yet another embodiment the therapeutic antibody and/or antigen-binding fragment thereof has a germinality index VL of 96.9%. In yet another embodiment the therapeutic antibody and/or antigen-binding fragment thereof has a total hydrophobicity score of 4.37. In yet another embodiment the therapeutic antibody and/or antigen-binding fragment thereof has a CDR hydrophobicity score of 1.45. In yet another embodiment the therapeutic antibody and/or antigen-binding fragment thereof has an scFv charge of 1.22. In yet another embodiment the therapeutic antibody and/or antigen-binding fragment thereof has a CDR total charge of −0.25. In yet another embodiment the therapeutic antibody and/or antigen-binding fragment thereof has a T_{m onset} of about 62.4° C. In yet another embodiment the therapeutic antibody and/or antigen-binding fragment thereof has a Tₘ₁ of about 69.3° C. In yet another embodiment the therapeutic antibody and/or antigen-binding fragment thereof has a Tₘ₂ of about 81.4° C. In yet another embodiment the therapeutic antibody and/or antigen-binding fragment thereof has a T_{agg} of about 69.9° C. In yet another embodiment the therapeutic antibody shows a “contamination ratio” of less than 0.2 in SEC-HLPC. In yet another embodiment the therapeutic antibody and/or antigen-binding fragment thereof has no unfavourable cysteines and/or glycosylations. In yet another embodiment the therapeutic antibody does not induce ADE or cytokine storm syndrome within a patient.

[0243] In one embodiment the therapeutic antibody and/or antigen-binding fragment thereof has a ACE2:RBD inhibition of the scFV of 49% and an isoelectric point (pI) of human IgG of 8.39. In yet another embodiment the therapeutic antibody and/or antigen-binding fragment thereof has a germinality index VH of 95.4% and a germinality index VL of 96.9%. In yet another embodiment the therapeutic antibody and/or antigen-binding fragment thereof has a total hydrophobicity score of 4.37 and a CDR hydrophobicity score of 1.45. In yet another embodiment the therapeutic antibody and/or antigen-binding fragment thereof has an scFv charge of 1.22 and a CDR total charge of −0.25. In yet another embodiment the therapeutic antibody and/or antigen-binding fragment thereof has a T_{m onset} of about 62.4° C. and a Tₘ₁ of about 69.3° C. In yet another embodiment the therapeutic antibody and/or antigen-binding fragment thereof has a Tₘ₂ of about 81.4° C. and a T_{agg} of about 69.9° C. In yet another embodiment the therapeutic antibody shows a “contamination ratio” of less than 0.2 in SEC-HLPC. In yet another embodiment the therapeutic antibody and/or antigen-binding fragment thereof has no unfavourable cysteines and/or glycosylations and does not induce ADE or cytokine storm syndrome within a patient.

[0244] In one embodiment the therapeutic antibody and/or antigen-binding fragment thereof has a ACE2:RBD inhibition of the scFV of 49%, an isoelectric point (pI) of human IgG of 8.39, a germinality index VL of 96.9%, a total hydrophobicity score of 4.37, a CDR hydrophobicity score of 1.45, an scFv charge of 1.22, a CDR total charge of −0.25, a T_{m onset} of about 62.4° C. and a Tₘ₁ of about 69.3° C. In yet another embodiment the therapeutic antibody and/or antigen-binding fragment thereof has a Tₘ₂ of about 81.4° C., a T_{agg} of about 69.9° C., a “contamination ratio” of less than 0.2 in SEC-HLPC, no unfavourable cysteines and/or glycosylations and does not induce ADE or cytokine storm syndrome within a patient.

[0245] In one embodiment the therapeutic antibody and/or antigen-binding fragment thereof has a ACE2:RBD inhibition of the scFV of 49%, an isoelectric point (pI) of human IgG of 8.39, a germinality index VL of 96.9%, a total hydrophobicity score of 4.37, a CDR hydrophobicity score of 1.45, an scFv charge of 1.22, a CDR total charge of −0.25, a T_{m onset} of about 62.4° C., a Tₘ₁ of about 69.3° C., a Tₘ₂ of about 81.4° C., a T_{agg} of about 69.9° C., a “contamination ratio” of less than 0.2 in SEC-HLPC, no unfavourable cysteines and/or glycosylations and does not induce ADE or cytokine storm syndrome within a patient.

[0246] In one embodiment the therapeutic antibody and/or antigen-binding fragment thereof has a T_{m onset} of 61.6±0.1° C. and/or a Trot of 68.8±0.1° C., and/or a Tₘ₂ of 81.9±0.1° C., and/or a T_{agg} of 71.3±0.1° C.

[0247] In another embodiment the therapeutic antibody and/or antigen-binding fragment thereof has a T_{m onset} of 60.1±0.2° C. and/or a Trot of 70.0±0.2° C., and/or a Tₘ₂ of 79.7±0.1° C., and/or a T_{agg} of 78.6±0.2° C.

[0248] In yet another embodiment the therapeutic antibody and/or antigen-binding fragment thereof has a T_{m onset} of 57.1±0.3° C. and/or a Tₘ₁ of 60.3±0.0° C., and/or a Tₘ₂ of 68.2±0.1° C., and/or a T_{agg} of 68.4±0.1° C.

[0249] In yet another embodiment the therapeutic antibody and/or antigen-binding fragment thereof has a T_{m onset} of 57.3±0.3° C. and/or a Tₘ₁ of 64.5±0.0° C., and/or a Tₘ₂ of 81.6±0.1° C., and/or a T_{agg} of 69.5±0.3° C.

[0250] In another embodiment the therapeutic antibody and/or antigen-binding fragment thereof has a T_{m onset} of 65.3±0.8° C. and/or a Tₘ₁ of 69.5±0.0° C., and/or a Tₘ₂ of 81.4±0.7° C., and/or a T_{agg} of 71.2±0.0° C.

[0251] In yet another embodiment the therapeutic antibody and/or antigen-binding fragment thereof has a T_{m onset} of 62.4±0.1° C. and/or a Tₘ₁ of 68.9±0.0° C., and/or a Tₘ₂ of 81.4±0.1° C., and/or a T_{agg} of 69.9±0.0° C.

[0252] In yet another embodiment the therapeutic antibody and/or antigen-binding fragment thereof has a T_{m onset} of 62.2±0.1° C. and/or a Tₘ₁ of 70.8±0.2° C., and/or a Tₘ₂ of 81.9±0.2° C., and/or a T_{agg} of 75.9±0.0° C.

[0253] In another embodiment the therapeutic antibody and/or antigen-binding fragment thereof has a T_{m onset} of 62.4±0.0° C. and/or a Tₘ₁ of 69.3±0.1° C., and/or a Tₘ₂ of 80.9±0.0° C., and/or a T_{agg} of 81.2±0.3° C.

[0254] In yet another embodiment the therapeutic antibody and/or antigen-binding fragment thereof has a T_{m onset} of 56.9±0.2° C. and/or a Tₘ₁ of 62.1±0.2° C., and/or a Tₘ₂ of 68.0±0.2° C., and/or a T_{agg} of 70.1±0.1° C.

[0255] In yet another embodiment the therapeutic antibody and/or antigen-binding fragment thereof has a T_{m onset} of 63.7±0.0° C. and/or a Tₘ₁ of 70.0±0.2° C., and/or a T_{agg} of 71.7±0.2° C. A further aspect, the present invention relates to a combination comprising at least 2, 3, 4, 5, 6 or more of the above monoclonal antibodies, particularly monoclonal antibodies or antigen-binding fragments thereof. In such a combination, the individual antibodies or fragments are present in suitable molar ratios. Typically, the molar ratios are in the range of about 1:5 to 5:1, particularly about 1:2 to 2:1. In certain embodiments, the antibody combination may comprise a single composition wherein the antibodies and antibody fragments in said composition consist of a predetermined number of different species of monoclonal antibodies or antibody fragments as described above.

[0256] The antibody combination may comprise a plurality of compositions each comprising a different species of monoclonal antibody or antibody fragment as described above. The combination of the present invention may be free from other antibodies or antibody fragments, particularly from polyclonal antibodies or antibody fragments.

[0257] In certain embodiments, the combination of antibodies or antigen-binding fragments has an IC₅₀ value of about 20 nM or less, of about 10 nM or less, or of about 5 nM or less, particularly when determined in molar ratios of 1:1 of the individual antibodies or antibody fragments as described in the present examples.

[0258] In certain embodiments, the combination of antibodies or antigen-binding fragments has an EC₅₀ value of about 20 nM or less, of about 10 nM or less, or of about 5 nM or less, particularly when determined in molar ratios of 1:1 of the individual antibodies or antibody fragments as described in the present examples.

[0259] In particular preferred are combinations of at least two antibodies selected from the group consisting of antibodies STE90-C11, YU505-A02, YU536-D04 and YU537-H11.

[0260] In a further embodiment, the combination is selected from the group consisting of antibodies YU534-009 and YU534-C12, YU534-009 and YU534-D09, YU534-009 and YU535-A02, YU534-009 and YU536-D04, YU534-009 and YU537-H08, YU534-009 and YU537-H11, YU534-009 and STE90-C11, YU534-C12 and YU534-D09, YU534-C12 and YU535-A02, YU534-C12 and YU536-D04, YU534-C12 and YU537-H08, YU534-C12 and YU537-H11, YU534-C12 and STE90-C11, YU534-D09 and YU535-A02, YU534-D09 and YU536-D04, YU534-D09 and YU537-H08, YU534-D09 and YU537-H11, YU534-D09 and STE90-C11, YU536-D04 and YU537-H08, YU536-D04 and YU537-H11, YU536-D04 and STE90-C11, YU537-H08 and YU537-H11, YU537-H08 and STE90-C11, YU537-H11 and STE90-C11.

[0261] In a further embodiment, the combination is selected from the group consisting of antibodies STE70-1E12 and STE72-8E1, STE70-1E12 and STE73-9G3, STE70-1E12 and STE73-2G8, STE72-8A6 and STE73-9G3, STE72-8A6 and STE73-2E9, STE72-8E1 and STE73-2B2, STE72-8E1 and STE72-8A2, STE73-9G3 and STE73-2B2, STE73-9G3 and STE72-8A2, STE73-262 and STE73-2C2, STE73-262 and STE73-2E9, STE73-262 and STE73-2G8, STE72-8E1 and STE72-2G4, STE72-8E1 and STE73-6C8, STE73-262 and STE73-6C1, STE73-2C2 and STE73-6C8, STE73-2E9 and STE72-2G4, STE73-2G8 and STE73-6C8, STE73-6C1 and STE72-2G4, STE73-6C1 and STE73-6C8, STE72-4C10 and STE73-2B2, STE72-4C10 and STE72-8A2 and STE72-4C10 and STE72-8E1.

[0262] The CDR, VH and/or VL sequences of the corresponding antibodies can be taken from the sequence listing and/or tables 1, 4-7.

[0263] The term “antigen” refers to a molecule or a portion of a molecule capable of being bound by a selective binding agent, such as an antigen binding protein (including, e.g., an antibody or immunological functional fragment thereof). In some embodiments, the antigen is capable of being used in an animal to produce antibodies capable of binding specifically to that antigen. An antigen can possess one or more epitopes that are capable of interacting with different antigen binding proteins, e.g., antibodies.

[0264] In specific embodiments, the antibody or antigen binding fragment thereof for use in the method of the invention may be monospecific, bispecific, or multispecific. Multispecific antibodies may be specific for different epitopes of one target polypeptide or may contain antigen-binding domains specific for epitopes of more than one target polypeptide.

[0265] The specific embodiments, antibody or antibody fragments of the invention may be conjugated to a therapeutic moiety (“immunoconjugate”), such as a cytotoxin, a chemotherapeutic drug, an immunosuppressant or a radioisotope.

[0266] Moreover, multi-specific antibodies (e.g., bispecifics) that bind to S1-protein and/or RBD and one or more additional antigens are nonetheless considered antibodies that “specifically bind’ S1-protein or RBD, as used herein.

[0267] The term “therapeutically effective amount” means an amount that produces the desired effect for which it is administered. The exact amount will depend on the purpose of the treatment, and will be ascertainable by one skilled in the art using known techniques (see, for example, Lloyd (1999) The Art, Science and Technology of Pharmaceutical Compounding).

[0268] In another embodiment, the invention pertains to a method for treating COVID-19 which is ameliorated, improved, inhibited or prevented with the antibodies and antigen-binding fragments therein, comprising administering a therapeutic amount of the pharmaceutical composition to a subject in need thereof.

[0269] In yet another embodiment, the invention pertains to an antibody or antigen-binding fragment thereof for use to attenuate or inhibit a SARS-CoV-2 mediated disease or condition.

[0270] In yet another embodiment, the invention pertains to the use of an antibody or antigen-binding fragment thereof in the manufacture of a medicament for use to attenuate or inhibit a SARS-CoV-2-mediated disease or condition.

[0271] In yet another embodiment, the invention pertains to one of the uses mentioned herein, wherein the SARS-CoV-2-mediated disease or condition is pleurisy, pericarditis, lung consolidation, pulmonary oedema, pneumonia, serous exudation, fibrin exudation, pulmonary oedema, pneumocyte hyperplasia, large atypical pneumocytes, interstitial inflammation with lymphocytic infiltration and multinucleated giant cell formation, diffuse alveolar damage (DAD) with diffuse alveolar exudates, acute respiratory distress syndrome (ARDS), severe hypoxemia, exudates in alveolar cavities and pulmonary interstitial fibrosis plasmocytosis in bronchoalveolar lavage (BAL), disseminated intravascular coagulation (DIC), leukoerythroblastic reaction and microvesicular steatosis in the liver.

[0272] In yet another embodiment, the invention pertains to the diagnostic use the antibody or antigen-binding fragment thereof. Uses include but are not limited to the detection of infections, recognition of allergies and the measurement of viral load and/or other biological markers in blood.

[0273] Unless defined otherwise, all technical and scientific terms used herein have the same meaning as commonly understood by one of ordinary skill in the art to which this invention belongs. Although any methods and materials similar or equivalent to those described herein can be used in the practice or testing of the present invention, preferred methods and materials are now described.

### Preparation of Human Antibodies

[0274] A fully human monoclonal antibody or antigen-binding fragment thereof can be produced in three ways.

[0275] In one approach, a mouse is used in which the immunoglobulin genes have been replaced with human genes. This mouse then makes antibody responses that use human antibody sequences.

[0276] A second approach uses a bacteriophage display library of human variable region sequences and selects for antigen binding in vitro. The selected genes are then combined with human constant region genes to reconstitute a complete IgG antibody.

[0277] A third approach utilizes B-cells for the production of antibodies.

[0278] As will be outlined in the examples in more detail, suspension panning may be used for high throughput antibody identification.

[0279] Notwithstanding, these human monoclonal antibody or antigen-binding fragment thereof can provoke immune responses (termed HAHA, or human anti-human antibody), probably largely akin to anti-idiotype responses that are themselves specific for the reagents' complementarity determining regions.

### Production of “Antigens” and Reference-Proteins

[0280] The antigens such as SARS-CoV-2 glycoprotein S and reference-proteins such as (human) ACE2 may be produced via isolation from an infected cell or host, or via conventional biotechnological methods, such as recombinant expression of the protein in a host cell, such as E. coli, yeast or the like.

[0281] Also fragments may be used according to this invention. As such the term “fragments” comprises preferably “functional fragments” which means parts of the full-length protein, which retains its specific function, such as for example binding activity, activation activity, inhibition activity and/or enzymatic activity. Normally such a functional fragment is a subunit and/or a domain of a protein, which is correctly three-dimensional folded when recombinantly expressed; or it is produced by isolating or recombinantly expressing the correctly folded full-length protein and then treating the full-length protein with a protease or other enzymatic or physical treatment which disconnects the subunit and/or domain of interest from the rest of the protein, thereby retaining its biological function.

[0282] Preferred functional fragments of the present invention include the receptor binding domain of the SARS-CoV-2 glycoprotein S, the S1 subunit of the SARS-CoV-2 glycoprotein S, the extracellular part of (human) ACE2, S1-mFc, S1-S2-His, RBD-hFc, IVIGs (intravenous immunoglobulins), as well as any fragment of an antibody which retains its binding ability to the antigen, etc.

### K_{D}-Measurement

[0283] As will be outlined in more detail in the examples, the K_{D} is measured for example with a protein A sensor loaded with the antibody or antigen-binding fragment thereof.

[0284] The antigen, for example a 51-HIS-fragment derived from the S1-subunit according SEQ-ID NO: 04, or a RBD of SEQ ID NO: 06, or the full S-protein of SARS-CoV-2 of SEQ-ID NO: 02 is then associated onto the antibody-loaded sensor. In this step the antigen is bound in different dilutions to the antibody-loaded sensor. Preferred dilutions range from 0 to 500 nM, in one embodiment a concentration regime of 0 nM, 7.8 nM, 15.6 nM, 31.2 nM, 62.5 nM, 125 nM, 250 nM and 500 nM antigen diluted in in 1% BSA-PBST (0.05% Tween 20).

[0285] Then each antibody-antigen loaded sensor is incubated with dissociation buffer and the dissociation is measured.

[0286] This measurement may be repeated after regeneration of the sensor by incubation with glycine in order to remove the antibody from the protein A and neutralization by incubation in PBS to neutralize the pH. Normally the measurement is repeated at least 5 times, 10 times, 15 times to achieve reliable K_{D}-values.

[0287] The sensor-material (protein A) without any antibody serves as a negative control in these measurements.

[0288] Further, the present invention relates to a nucleic acid molecule, e.g. a DNA molecule, encoding an antibody VH region, or an antibody VL region, or encoding a complete antibody or an antibody fragment as indicated above, a vector or vector system, i.e. a plurality of vectors, comprising said nucleic acid molecule(s) as indicated above in operative linkage with an expression control sequence, particularly with a heterologous expression control sequence. Furthermore, the invention relates to a cell comprising a nucleic acid molecule or a vector or vector system as described above. Vectors for the recombinant production of antibodies are well known in the art.

[0289] The cell may be known host cell for producing antibodies or antibody fragments, e.g. a prokaryotic cell such as an E. coli cell, a yeast cell, an insect cell or a mammalian cell, e.g. a CHO cell or a hybridoma cell.

[0290] Still a further aspect of the present invention is a method of recombinantly producing an antibody or antibody fragment by growing a cell as described above in a culture medium and obtaining the antibody or antibody fragment from the cell or the culture medium. Suitable culture media and culture conditions are well known in the art.

### Binding of Therapeutic Antibodies to SARS-CoV-2-“Escape”-Mutants

[0291] In one embodiment the present invention provides a therapeutic antibody or antigen-binding fragment thereof, which does not only bind to the glycoprotein S with the amino acid sequence of SEQ ID NO: 02 and neutralizes the infectious activity of SARS-CoV-2, but which also shows specific binding specifically to the “escape”-mutants of the glycoprotein S of SARS-CoV-2 in order to neutralize the infectious activity of these SARS-CoV-2-mutants. This is in contrast to prior-art anti-SARS-CoV-2 antibodies, whose binding is blocked by known RBD mutations, endowing the antibody of the present invention with intrinsic higher resistance to possible escape mutants.

[0292] The “escape”-mutation mentioned herein is selected from the list consisting of S1-V367F, S1-N439K, S1-G4765, S1-V483A, S1-E484K, S1-G485R, S1-F486V and 51-7PM (SEQ ID NO: 1730).

[0293] The mutations were published in the following sources:
[0294] V367F: GISAID EpiFlu™ Database
[0295] N439K: GISAID EpiFlu™ Database
[0296] G476S: Shi et al. (https://doi.org/10.1038/s41586-020-2381-y)
[0297] V483A: Shi et al.
[0298] E484K: Baum et al. (https://doi.org/10.1126/science.abd0831)
[0299] G485R: GISAID EpiFlu™ Database
[0300] F486V: Baum et al.

[0301] All of these mutations lie in the three regions identified by Yi et al. (Cell. & Mol. Imm., 15 May 2020) which are in the regions of between aa 439 to 456; aa 473 to 476 and aa 483 to 505.

[0302] In one aspect the present invention discloses even a therapeutic antibody or antigen-binding fragment thereof, which binds specifically to the S1-7PM-mutant (SEQ ID NO: 1730), i.e. a mutant which comprises all seven “escape”-mutations in one molecule.

[0303] Thus, one advantage of the inventive antibodies is the recognition of a large number of known “escape”-mutations. This allows the treatment of a wide range of patients with just one antibody-composition, simplifying the administration scheme and lowering costs for production and market-approval significantly. This is advantageous especially in comparison to compositions comprising cocktails of two or more monoclonal antibodies.

[0304] Furthermore, without being bound to theory, it seems that the inventive antibodies recognize a “sweet spot” in the glycoprotein S, which seems to be important for the interaction of the virus with the host cell and, thus, cannot be changed without loss of infectivity or viral function. Thus, another technical advantage of the inventive antibodies is that the likelihood of the virus mutating in a way which “escapes” the antibody is significantly reduced.

[0305] Some experiments were conducted with a number of antibodies against the seven “escape”-mutants. As control the two published antibodies RGN10933 and RGN10987 were used.

### ELISA Titrating Abs on Wild-Type and Mutated S1-Protein

[0306] It turned out that all antibodies produced by the selected method showed a good binding profile to all “escape”-mutants including the S1-7PM-mutant (cf. example 11 and FIGS. 29-31). In contrast, RGN10933 did not bind to the S1-7PM-mutant and showed reduced binding specifically to at least the F486V-mutant.

### An Affinity Test of the Selected Abs Against Mutated S1-Protein

[0307] The overall affinity of the inventive antibodies against the targets was tested in a BLI-assay (cf. example 13 and FIG. 33). The affinity was still high enough to qualify the antibodies as therapeutic antibodies, although reduced against the “escape”-mutants as compared to the “wild-type”-S1-protein.

[0308] Again, RGN10933 showed a significant weaker binding specifically to some mutants, and the binding specifically to F486V and S1-7PM was so low that it could not be measured.

### Affinity Tests of the Selected Abs Against Further RBD-Mutants

[0309] Recently, several SARS-CoV-2 variants with mutations in the RBD emerged. Here most prominent are the B.1.1.7 (“UK”, RBD mutation N501Y), B.1.351 (“Southafrica”, K417N, E484K, N501Y) and P1 (B.1.1.28.1) (“Brazil”, K417T, E484K, N501Y) (Rees-Spear et al., 2021). More recently other variants like B.1.429+B.1.427 (“Southern California”, L452R) (Zhang et al., 2021), B.1.526 (“New York”, E484K, in some variants S477N instead of E484K) (Annavajhala et al., 2021), B.1.258Δ (“Czech”, N439K) (Brejova et al., 2021; Surleac et al., 2021), P2 (B.1.1.28.2) (E484K) (Nonaka et al., 2021), P3 (B.1.1.28.3) (E484K, N501Y) (Tablizo et al., 2021), B.1.1.33 (E484K) (Resende et al., 2021), B.1.617 (“India”, L452R, E484Q) (Ranjan et al., 2021) and other variants like B.1.525 (E484K) (Hodcroft et al., 2021) occurred.

[0310] YU537-H11, YU536-D04 and STE90-C11 were tested against a number of RBD-mutants selected from the list comprising F486V-mutant, G485D-mutant, E484K-mutant, F486A-mutant, K417N/T-mutant, B.1.1.7 (N501Y)-mutant, B.1.351 (K417N, E484K, N501Y)-mutant, B.1.1.28.1 (K417T, E484K, N501Y)-mutant, B.1.429/111.427 (L452R)-mutant, B.1.526 (E484K or S477N)mutant, B1.2580 (N439K)-mutant, B.1.525 (E484K)-mutant, B.1.1.28.2 (E484K)-mutant, B.1.617 (L452R, E484Q)-mutant and B.1.1.33 (E484K)-mutant.

[0311] It turned out that YU537-H11 (SEQ ID. No.: 389-408), YU536-D04 (SEQ ID No.: 349-368) and STE90-C11 (SEQ ID No.: 1305-1312) were still binding to most analyzed RDB mutants (see examples 15-18).

[0312] Thus, in one embodiment the present invention provides a therapeutic antibody or antigen-binding fragment thereof which binds to at least one RBD-mutant selected from F486V-mutant, G485D-mutant, E484K-mutant, F486A-mutant, K417N/T-mutant, N501Y-mutant, K417N/E484K/N501Y-triple-mutant, K417T/E484K, /N501Y-triple-mutant, L452R-mutant, E484K and/or S477N-mutant, N439K-mutant, and L452R/E484Q-double-mutant.

[0313] Thus, in one embodiment the present invention provides a therapeutic antibody or antigen-binding fragment thereof, which binds to at least one of said mutants, preferably to at least 2 of said mutants, more preferably to at least 3 of said mutants; more preferably to at least 4 of said mutants; more preferably to at least 5 of said mutants; and up to 8 of said mutants, more preferably up to 9 of said mutants, even more preferably up to 10 of said mutants, and most preferably up to all of them.

[0314] Without being bound to theory, it is likely that the wide interface area and the extensive light chain contacts may compensate the exchange of several amino acids in the target sequence. The calculated interface area of STE90-C11 VL is 1133 Å², and, thus, more than twice the area of REGN10933 and REGN10987 and slightly larger compared to CB6 or CR3022.

[0315] Thus, in one embodiment the present invention provides a therapeutic antibody or antigen-binding fragment thereof, which does have an interface area with the RBD of at least 800 Å², more preferred of at least 900 Å², even more preferred of at least 1000 Å²; even more preferred of at least 1100 Å², most preferred of at least 1130 Å² and more, as calculated with the PISA-tool as published in E. Krissinel and K. Henrick (2007). ‘Inference of macromolecular assemblies from crystalline state.’. J. Mol. Biol. 372, 774-797 and further explained in E. Krissinel and K. Henrick (2005). Detection of Protein Assemblies in Crystals. In: M. R. Berthold et. al. (Eds.): CompLife 2005, LNBI 3695, pp. 163-174. Additional details of the algorithm is disclosed in E. Krissinel (2009). Crystal contacts as nature's docking solutions. J Comput Chem. 2010 Jan. 15; 31(1):133-43; DOI 10.1002/jcc.21303.

[0316] In one embodiment said antibody is selected from the list comprising YU537-H11 (SEQ ID. No.: 389-408), YU536-D04 (SEQ ID. No.: 349-368) and STE90-C11 (SEQ ID. No.: 1305-1312), and/or any combination thereof.

### Conserved CDR-Sequences

[0317] A unifying sequence concept was developed confirming the earlier finding that the antibodies of the present invention represent a cluster of antibodies which shows advantageous features when it comes to the ability to recognize SARS-CoV-2-mutants.

[0318] In detail the sequences of the light and heavy chains of STE90-C11 (SEQ ID NO.: 1305 & 1309), YU536-D04 (SEQ ID NO.: 362 & 364) and YU537-H11 (SEQ ID NO.: 402 & 404) were aligned with the software tool Clustal™-Omega. As it comes apparent from the amino acid sequence alignment, in at least one embodiment conserved amino acids could be identified in the CDR-regions which apparently are of importance when it comes to the advantageous binding abilities of the antibodies of the present invention (cf. also example 16, FIGS. 43 & 44) and which supports the finding that all inventive antibodies are structural related to each other.

[0319] Thus, “archetype” CDR-sequences can be identified, which are preferred:

[0320] In one embodiment the light-chain CDR1 is, except a maximum of two amino acids, preferably except a maximum of only one amino acid, identical to RASQGISSYLA (SEQ ID No. 1831); and/or the CDR2 is, except a maximum of two amino acids, preferably except a maximum of only one amino acid, identical to AASTLQS (SEQ ID No. 1832) and/or the CDR3 is, except a maximum of three amino acids, preferably except a maximum of two amino acids, most preferably except a maximum of only one amino acid, identical to QQLNSYP(P/−)(F/I)T (SEQ ID No. 1833) (cf. also FIG. 43).

[0321] Wherein “-” represents a deletion of an amino acid (in this case the deletion of one P); (F/I) or the like represents a conservative amino acid substitution between for example phenylalanine and isoleucine.

[0322] In one embodiment the heavy-chain CDR1 is, except a maximum of two amino acids, preferably except a maximum of only one amino acid, identical to SNYMS (SEQ ID No. 1834); and/or the CDR2 is, except a maximum of two amino acids, preferably except a maximum of only one amino acid, identical to VIYSGGSTYYADSVKG (SEQ ID No. 1835) and/or the CDR3 is represented by the general sequence D(V/L)(a/v)XX(a/g)(F/L)D(I/V) (SEQ ID No. 1836) (cf. also FIG. 43). Wherein X represents any natural occurring amino acid; (V/L) or the like represents a conservative amino acid substitution between for example valine and leucine; and wherein (a/v) or the like represents a semi-conservative amino acid substitution between for example alanine and valine.

[0323] In another embodiment the light-chain CDR1 is represented by the generalized sequence X.S . . . XXX . . . Y:: (SEQ ID No. 1837) wherein X represents any natural occurring amino acid (or in positions 6 and 7 a deletion); a period “.” represents a semi-conservative amino acid exchange for example as follows: in position 2 preferably a glycine (G) or alanine (A); in position 4 preferably a serine (S) or glutamine (Q); in position 5 preferably a serine (S) or glycine (G); in position 9 preferably an asparagine (N) or serine (S); in position 10 preferably an asparagine (N) or serine (S); and wherein a colon “:” represents a conservative amino acid exchange for example as follows: in position 12 preferably a valine (V) or leucine (L); in position 13 preferably a serine (S) or alanine (A). In another embodiment the light-chain CDR1 comprises at least in position 3 a serine and in position 11 a tyrosine; i.e. as depicted in the following generalized sequence XXSXXXXXXXYXX (SEQ ID No. 1838) wherein X represents any natural occurring amino acid (cf. also FIG. 44).

[0324] In another embodiment the light-chain CDR2 is represented by the generalized sequence X: . . . XXS (SEQ ID No. 1839); wherein X represents any natural occurring amino acid; a period “.” represents a semi-conservative amino acid exchange for example as follows: in position 3 preferably an asparagine (N) or serine (S); in position 4 preferably a lysine (K) or threonine (T); and wherein a colon “:” represents a conservative amino acid exchange for example as follows: in position 2 preferably a threonine (T) or alanine (A). In another embodiment the light-chain CDR2 comprises at least in position 7 a serine; i.e. as depicted in the following generalized sequence XXXXXXS (SEQ ID No. 1840); wherein X represents any natural occurring amino acid (cf. also FIG. 44).

[0325] In another embodiment the light-chain CDR3 is represented by the generalized sequence XXX:SXXXXX. (SEQ ID No. 1841); wherein X represents any natural occurring amino acid or deletion; a period “.” represents a semi-conservative amino acid exchange for example as follows: in position 11 preferably a valine (V) or threonine (T); and wherein a colon “:” represents a conservative amino acid exchange for example as follows: in position 4 preferably an asparagine (N) or aspartic acid (D). In another embodiment the light-chain CDR3 comprises at least in position 5 a serine; i.e. as depicted in the following generalized sequence XXXXSXXXXXX (SEQ ID No. 1842); wherein X represents any natural occurring amino acid or in positions 8 and/or 9 a deletion (cf. also FIG. 44).

[0326] In another embodiment the heavy-chain CDR1 is, except a maximum of two amino acids, preferably except a maximum of only one amino acid, identical to SNYMS (SEQ ID No. 1834); and/or the CDR2 is, except a maximum of two amino acids, preferably except a maximum of only one amino acid, identical to VIYSGGSTYYADSVKG (SEQ ID No. 1835) and/or the CDR3 is represented by the general sequence (G/D)XXXXXX(a/g)(M/F/L)D(I/V) (SEQ ID No. 1843) (cf. also FIG. 43); wherein X represents any natural occurring amino acid (and/or in positions 4, 5 and/or 6 a deletion); (M/F/L) or the like represents a conservative amino acid substitution between for example methionine, phenylalanine and leucine; and wherein (a/g) or the like represents a semi-conservative amino acid substitution between for example alanine and glycine. In another embodiment the heavy-chain CDR3 comprises at least in position 10 an aspartic acid; i.e. as depicted in the following generalized sequence XXXXXXXXXDX (SEQ ID No. 1844); wherein X represents any natural occurring amino acid (and/or in positions 4, 5 and/or 6 a deletion) (cf. also FIG. 44).

[0327] A “conservative amino acid substitution” (also called a conservative mutation or a conservative replacement) is defined herein as an amino acid replacement in a protein that changes a given amino acid to a different amino acid with similar biochemical properties (e.g. charge, hydrophobicity and size).

[0328] There are 20 naturally occurring amino acids, however some of these share similar characteristics. For example, leucine and isoleucine are both aliphatic, branched hydrophobes. Similarly, aspartic acid and glutamic acid are both small, negatively charged residues.

[0329] Although there are many ways to classify amino acids, they are often sorted into six main classes on the basis of their structure and the general chemical characteristics of their side chains (R groups).

[0330] Class 1 “aliphatic”: glycine, alanine, valine, leucine, isoleucine (G, A, V, L, I); class 2 “hydroxyl or sulfur/selenium-containing”: serine, cysteine, selenocysteine, threonine, methionine (S, C, U, T, M); class 3 “cyclic”: proline (P); class 4 “aromatic”: phenylalanine, tyrosine, tryptophan (F, Y, W); class 5 “basic”: histidine, lysine, arginine (H, K, R); class 6 “acidic and their amides”: aspartate, glutamate, asparagine, glutamine (D, E, N, Q).

[0331] Physicochemical distances aim at quantifying the intra-class and inter-class dissimilarity between amino acids based on their measurable properties, and many such measures have been proposed in the literature. Owing to its simplicity, one of the most commonly used measures is the one of Miyata et al (1979). A conservative replacement is therefore an exchange between two amino acids separated by a small physicochemical distance. Conservative replacements in proteins often have a smaller effect on function than non-conservative replacements.

[0332] A conservative exchange may be also defined with the help of the Clustal™ software, preferable with Clustal™-Omega. Therein asterisk “*” is defined as positions that have a single and fully conserved residue; colon “:” is defined as conservation between groups of strongly similar properties with a score greater than 0.5 on the PAM 250 matrix; and period “.” is defined as conservation between groups of weakly similar properties with a score less than or equal to 0.5 on the PAM 250 matrix.

[0333] The sequence similarity also supports the inventive idea of a compatibility of the different light and heavy chains with each other. As could be shown in example 19 (cf. FIG. 46) also hybrid-antibodies with light chain and heavy chain of different sources resulted not only in good binding to the wild-type RBD, but even in improved binding to some critical mutants.

[0334] Thus, in one embodiment the inventive antibodies, or antigen-binding fragments thereof, may be combined in their light or heavy chain, in some embodiments in their CDR-domains, in order to achieve further antibodies with the effect of both recognition of many RBD-mutants as well as excellent neutralizing activity.

Animal Tests with the Inventive Antibodies

[0335] The inventive antibodies, or antigen-binding fragments thereof, show also good reduction of viral load in animals, such as hamsters or mice (cf. example 17).

[0336] Thus, in one embodiment the present invention provides a therapeutic antibody or antigen-binding fragment thereof, which in one embodiment reduces the viral titer in vivo from 10⁵ or more to 10³ or less after 3 days of treatment and/or from 10⁵ or more to 10² or less after 5 days of treatment. In yet another embodiment the therapeutic antibody or antigen-binding fragment thereof reduces the viral titer in vivo from 10⁶ or more to 10⁴ or less after 3 days of treatment and/or from 10⁶ or more to 10³ or less after 5 days of treatment. In one embodiment said antibody is selected from the list comprising YU537-H11 (SEQ ID. No.: 389-408), YU536-D04 (SEQ ID. No.: 349-368) and STE90-C11 (SEQ ID. No.: 1305-1312), and/or any combination thereof.

[0337] Thus, in yet another embodiment the present invention provides a therapeutic antibody or antigen-binding fragment thereof, which prevents a severe course of the COVID-19 disease upon treatment. In one embodiment said antibody is selected from the list comprising YU537-H11 (SEQ ID. No.: 389-408), YU536-D04 (SEQ ID. No.: 349-368) and STE90-C11 (SEQ ID. No.: 1305-1312), and/or any combination thereof.

### Preventive Use of the Inventive Antibodies

[0338] As already described in other parts of this specification, the therapeutic use of the antibodies or antigen-binding fragments thereof of the present invention, may include
[0339] (1) the prevention or reduction of the infectivity of SARS-CoV-2;
[0340] (2) the prevention or reduction of any overreaction of the immune-system of the host (e.g. ADE-reaction or cytokine storm syndrome), and/or
[0341] (3) the prevention or reduction of any condition associated with COVID-19, such as fever, cough, fatigue, shortness of breath, loss of smell and taste, pleurisy, pericarditis, lung consolidation, pulmonary oedema, pneumonia, serous exudation, fibrin exudation, pulmonary oe-dema, pneumocyte hyperplasia, large atypical pneumocytes, interstitial inflammation with lymphocytic infiltration and multinucleated giant cell formation, diffuse alveolar damage (DAD), diffuse alveolar exudates, acute respiratory distress syndrome (ARDS), severe hypoxemia, exudates in alveolar cavities and pulmonary interstitial fibrosis plasmocytosis in bronchoalveolar lavage (BAL), disseminated intravascular coagulation (DIC), leukoerythroblastic reaction, microvesicular steatosis in the liver and any combination thereof.

[0342] In one aspect of the present invention the antibodies or antigen-binding fragments thereof of the present invention are applied if the patient shows at least one of the following symptoms: manifested, productive and unproductive cough, fever, cold, disturbance of the olfactory and/or taste sensors, pneumonia, sore throat, shortness of breath, headache and body aches, loss of appetite, weight loss, nausea, abdominal pain, vomiting, diarrhea, conjunctivitis, skin rash, lymph node swelling, apathy, somnolence.

[0343] In yet another aspect, the person to be treated with the antibodies or antigen-binding fragments thereof of the present invention may be asymptomatic or pre-symptomatic, but has an elevated risk of developing a COVID-19 disease, because, for example, belonging to a risk group, e.g. with an age above 60 years, above 65 years, above 70 years, above 75 years; and/or because the person having a disease which is known to elevate the risk of a severe COVID-19 disease, such as diabetes, asthma, obesity, cardiovascular diseases, COPD, immune-deficiency, cancer, or the like; and/or because the person was exposed or will be exposed to another person which was tested positive for a COVID-19 disease; and/or because the person has a biomarker (e.g. blood group, IL-6-levels, etc.), which deviation from the norm (e.g. presence, elevation or decrease as compared to control group) is associated with an elevated risk of a severe COVID-19 disease.

[0344] In another aspect of the invention the antibodies or antigen-binding fragments thereof of the present invention are applied if the patient is pregnant in order to prevent a COVID-19 disease.

[0345] In yet another aspect of the invention the antibodies or antigen-binding fragments thereof of the present invention are applied, if the patient is suspected to develop or has already developed a multisystem inflammatory syndrome, which mainly seems to occur in children (MIS-C).

[0346] According to the CDC classification, one speaks of a MIS-C if the following criteria are met:
[0347] A person aged<21 years with fever, inflammation in the laboratory AND
[0348] Signs of a clinically serious illness that requires hospitalization with a multisystem (>2) organ involvement (cardiac, renal, respiratory, hematological, gastrointestinal, dermatological or neurological) AND
[0349] no alternative plausible diagnoses are available AND
[0350] positive for a current or recent SARS-CoV-2 infection (detection by RT-PCR, serology or Antigen test or COVID-19 exposure within 4 weeks prior to the onset of symptoms).

### Therapeutic Administration and Formulations

[0351] The invention provides therapeutic compositions comprising the antibodies or antigen-binding fragments thereof of the present invention. The administration of therapeutic compositions in accordance with the invention will be administered with suitable carriers, excipients, and other agents that are incorporated into formulations to provide improved transfer, delivery, tolerance, and the like.

[0352] A multitude of appropriate formulations can be found in the formulary known to all pharmaceutical chemists: Remington's Pharmaceutical Sciences, Mack Publishing Company, Easton, PA.

[0353] These formulations include, for example, aqueous solutions, powders, pastes, ointments, jellies, waxes, oils, lipids, lipid (cationic or anionic) containing vesicles (such as LIPOFECTIN™), DNA conjugates, anhydrous absorption pastes, oil-in-water and water-in-oil emulsions, emulsions carbowax (polyethylene glycols of various molecular weights), semi-solid gels, and semi-solid mixtures containing carbowax.

[0354] The dose may vary depending upon the age and the size of a subject to be administered, severity of the target disease, individual condition of the subject, route of administration, and the like.

[0355] The antibody and antigen-binding fragment thereof is used for treating various conditions and diseases associated with SARS-CoV-2, including fever, cough, fatigue, shortness of breath, loss of smell and taste, pleurisy, pericarditis, lung consolidation, pulmonary oedema, pneumonia, serous exudation, fibrin exudation, pulmonary oedema, pneumocyte hyperplasia, large atypical pneumocytes, interstitial inflammation with lymphocytic infiltration and multinucleated giant cell formation, diffuse alveolar damage (DAD), diffuse alveolar exudates, acute respiratory distress syndrome (ARDS), severe hypoxemia, exudates in alveolar cavities and pulmonary interstitial fibro-sis plasmocytosis in bronchoalveolar lavage (BAL), disseminated intravascular coagulation (DIC), leukoerythroblastic reaction, microvesicular steatosis in the liver and any combination thereof.

[0356] Depending on the severity of the condition, the frequency and the duration of the treatment can be adjusted.

[0357] Various delivery systems are known and can be used to administer the pharmaceutical composition of the invention, e.g., encapsulation in liposomes, microparticles, microcapsules, recombinant cells capable of expressing the mutant viruses, receptor mediated endocytosis.

[0358] Methods of introduction include, but are not limited to, intradermal, intramuscular, intraperitoneal, intravenous, subcutaneous, intranasal, epidural, inhalative and oral routes.

[0359] The composition may be administered by any convenient route, for example by infusion or bolus injection, by absorption through epithelial or mucocutaneous linings (e.g., oral mucosa, rectal and intestinal mucosa, etc.) and may be administered together with other biologically active agents. Administration can be systemic or local.

[0360] The pharmaceutical composition can be also delivered in a vesicle, in particular a liposome.

[0361] In certain embodiments, the pharmaceutical composition can be delivered in a controlled release system, such as a pre-filled syringe, a dermal patch, infusion, pen- or auto-injector-device (single-dose, multi-dose, disposable, re-usable), syrette, large-volume pump-device, and the like.

[0362] In one embodiment a pre-filled syringe, or auto-injector, or pump device is preferred.

[0363] In another embodiment, polymeric materials can be used. In yet another embodiment, a controlled release system can be placed in proximity of the composition's target, thus requiring only a fraction of the systemic dose.

[0364] The injectable preparations may include dosage forms for intravenous, subcutaneous, intracutaneous and intramuscular injections, drip infusions, etc.

[0365] These injectable preparations may be prepared by methods publicly known.

[0366] For example, the injectable preparations may be prepared, e.g., by dissolving, suspending or emulsifying the antibody or its salt described above in a sterile aqueous medium or an oily medium conventionally used for injections.

[0367] As the aqueous solution for injections, there are, for example, physiological saline, an isotonic solution containing glucose and other auxiliary agents, etc., which may be used in combination with an appropriate solubilizing agent such as an alcohol (e.g., ethanol), a polyalcohol (e.g., propylene glycol, polyethylene glycol), a nonionic surfactant [e.g., polysorbate 80, HCO-50 (polyoxyethylene (50 mol) adduct of hydrogenated castor oil)], etc.

[0368] As the oily medium, there are employed, e.g., sesame oil, soybean oil, etc., which may be used in combination with a solubilizing agent such as benzyl benzoate, benzyl alcohol, etc. The injection thus prepared is preferably filled in an appropriate ampoule.

[0369] A pharmaceutical composition of the present invention can be delivered subcutaneously or intravenously with a standard needle and syringe.

[0370] In addition, with respect to subcutaneous delivery, a pen delivery device readily has applications in delivering a pharmaceutical composition of the present invention. Such a pen delivery device can be reusable or disposable. A reusable pen delivery device generally utilizes a replaceable cartridge that contains a pharmaceutical composition. Once all of the pharmaceutical composition within the cartridge has been administered and the cartridge is empty, the empty cartridge can readily be discarded and replaced with a new cartridge that contains the pharmaceutical composition. The pen delivery device can then be reused.

[0371] In a disposable pen delivery device, there is no replaceable cartridge. Rather, the disposable pen delivery device comes prefilled with the pharmaceutical composition held in a reservoir within the device.

[0372] Once the reservoir is emptied of the composition, the entire device is discarded.

[0373] Numerous reusable pen and auto-injection delivery devices have applications in the subcutaneous delivery of a pharmaceutical composition of the present invention. Examples include, but certainly are not limited to AUTOPEN™ (Owen Mumford, Inc., Woodstock, UK), DISETRONIC™ pen (Disetronic Medical Systems, Burghdorf, Switzerland), HUMALOG MIX 75/25™ pen, HUMALOG™ pen, HUMALIN 70/30™ pen (Eli Lilly and Co., Indianapolis, IN), NOVOPEN™I, II and III (Novo Nordisk, Copenhagen, Denmark), NOVOPEN JUNIOR™ (Novo Nordisk, Copenhagen, Denmark), BD™ pen (Becton Dickinson, Franklin Lakes, NJ), OPTIPEN™, OPTIPEN PRO™ OPTIPEN STARLET™, and OPTICLIK™ (sanofi-aventis, Frankfurt, Germany), to name only a few.

[0374] Examples of disposable pen delivery devices having applications in subcutaneous delivery of a pharmaceutical composition of the present invention include, but certainly are not limited to the SOLOSTAR™ pen (sanofi-aventis), the FLEXPEN™ (Novo Nordisk), and the KWIKPEN™ (Eli Lilly).

[0375] Advantageously, the pharmaceutical compositions for oral or parenteral use described above are prepared into dosage forms in a unit dose suited to fit a dose of the active ingredients.

[0376] Such dosage forms in a unit dose include, for example, tablets, pills, capsules, injections (ampoules), suppositories, etc.

[0377] The amount of the aforesaid antibody contained is generally about 5 to about 500 mg per dosage form in a unit dose; especially in the form of injection, it is preferred that the aforesaid antibody is contained in about 5 to about 100 mg and in about 10 to about 250 mg for the other dosage forms.

[0378] The invention provides therapeutic methods in which the antibody or antibody fragment of the invention is useful to treat COVID-19 associated with a variety of conditions involving SARS-CoV-2. The antibodies or antigen-binding fragments of the invention are particularly useful for the treatment of the viral infection with SARS-CoV-2.

[0379] Combination therapies may include the antibodies or antigen-binding fragments of the invention with, for example, one or more of any agent that
[0380] (1) prevents or reduces the infectivity of SARS-CoV-2;
[0381] (2) prevents or reduces secondary infections with other viruses (especially respiratory viruses such as influenza), bacteria (especially bacteria residing in the respiratory tract of the host) and/or parasites;
[0382] (3) prevents or reduces any overreaction of the immune-system of the host (e.g. ADE-reaction or cytokine storm syndrome)
[0383] (4) prevents or reduces any conditions associated with COVID-19, such as fever, cough, fatigue, shortness of breath, loss of smell and taste, pleurisy, pericarditis, lung consolidation, pulmonary oedema, pneumonia, serous exudation, fibrin exudation, pulmonary oedema, pneumocyte hyperplasia, large atypical pneumocytes, interstitial inflammation with lymphocytic infiltration and multinucleated giant cell formation, diffuse alveolar damage (DAD), diffuse alveolar exudates, acute respiratory distress syndrome (ARDS), severe hypoxemia, exudates in alveolar cavities and pulmonary interstitial fibrosis plasmocytosis in bronchoalveolar lavage (BAL), disseminated intravascular coagulation (DIC), leukoerythroblastic reaction, microvesicular steatosis in the liver and any combination thereof.

[0384] Examples of such therapeutic agents to be used in combination with the antibodies or antigen-binding fragments of the invention in a pharmaceutical composition include, but are not limited to antiviral drugs including Indinavir, Saquinavir, Lopinavir, Ritonavir, interferone-beta, Remdesivir, Favipiravir, Oseltamivir, Chloroquin, Hydroxychloroquin, Umifenovir; serine proteases, including TMPRSS2 or Camostatmesilat; antibiotics, including Linezolid, Azithromycin, Nemonoxacin or Fluorchinolone; interleukin-6-rezeptor-antagonists, including Tocilizumab or Sarilumab in mono-therapy or combined with Methotrexate; anti-parasite treatments, including Ivermectin; anticoagulants and any combination thereof.

[0385] In a further embodiment the antibodies or antigen-binding fragments of the invention in a pharmaceutical composition may be combined with at least one member of the group comprising Tocilizumab, Dexamethasone, Remdesivir, Lopinavir, Hydroxychloroquine, Hydrocortisone, Methylprednisolone, Prednisolone, antibiotics, and any combination thereof.

[0386] The term “melting temperature of a protein (Tₘ)” as used herein means a value which is a thermodynamic parameter of a protein that can only strictly be determined under thermodynamic equilibrium conditions and with well-known baseline parameters for the required thermodynamic fit. However, thermal unfolding experiments are often not in equilibrium, because irreversible protein aggregation processes keep removing unfolded protein from the reaction, making the unfolding process irreversible. Heating rates faster than 1° C./min additionally decrease the equilibrium-resemblance of the unfolding reaction. Tₘ₁ as used herein refers to the unfolding of the a first domain (for example Fc) of the tested antibody; Tₘ₂ as used herein refers to the unfolding of a second domain (for example Fab) of the tested antibody.

[0387] The term “onset temperature of thermal melting (T_{m onset})” as used herein means the temperature at which thermal protein unfolding starts. It is determined from the first derivative curve of the thermal unfolding signal (either 350/330 nm ratio signal or individual 350 and 330 nm signals).

[0388] The term “Inflection point (IP)” as used herein means that due to constraints, in nanoDSF, thermal melting temperatures of proteins are determined directly from the measured data by using a smoothing algorithm and detection of inflection points in the data. Assuming an equilibrium, determined IPs correspond to the Tₘ values of protein.

[0389] The term “onset temperature of protein aggregation (T_{agg})” as used herein means the temperature at which the protein sample starts to aggregate. It is determined from the first derivate curve of the back-scattering signal. Typically, T_{agg} correlates with Tₘ. For proteins that show more than one unfolding event, aggregation may start as a consequence of the first unfolding event or of later ones.

[0390] The term “ratio 350/330” as used herein means the measure for a spectral shift in the fluorescence emission profile of the Tryptophan (Trp) residues. This shift occurs in most unfolding events and is caused by the environmental change that the Trp residues undergo upon unfolding of the protein: In the folded state, Trp residues are often buried in the hydrophobic core of a protein, which leads to the fluorescence emission peaking around 330 nm. They then become surface-exposed during unfolding, which often shifts the fluorescence emission peak toward 350 nm. Since the ratio 350 nm/330 nm typically obliterates effects of auto-fluorescent additives and general fluorescence decay with increasing temperature, this detection mode is usually more robust than single wavelength detection. Therefore, clear IP points and Tₘs can be derived which might not be visible in the single wavelength detection modes. Vice versa, it is also possible that unfolding events which do not trigger an emission peak shift are visible in the single wavelength data, but not in the ratio.

[0391] The term “scattering” as used herein means the phenomenon that any particle struck by light will reradiate its energy in all directions with an intensity depending on the direction. The intensity of light passing through a sample containing particles (e.g. aggregates) will decrease as the light encounters each particle and gets scattered. The Prometheus™ system measures this using backreflection optics in order to understand a sample's aggregation behavior.

[0392] The term “germinality index” (GI) describes herein the percentage of identity to the IMGT human germline gene. CDR3 is excluded from the analysis, since it is not encoded in the germline gene. For VH a homology of >90.8% the tool score is +1 and for a homology<80.7% the tool score is −1. For VL a homology of >95.1% the tool score is +1 and for a homology<85.5% the tool score is −1.

[0393] The term “hydrophobicity score” as used herein is calculated and summed to total score (similar to SAP (Spatial-Aggregation-Propensity) algorithm; Chennamsetty, 2009. For the total hydrophobicity score the scores of all VH and VL residues are summed up if they are >0.05 (hydrophobic and on the surface). The tool score is +1 for a total score<5.1 and the tool score is −1 for a total score>5.1. For the total hydrophobicity score the scores of all CDR residues of VH and VL (Kabat annotation) are summed up if they are >0.05 (hydrophobic and on the surface). The tool score is +1 for a CDR score<2.3 and the tool score is −1 for a CDR score>2.5.

[0394] The term pI (isoelectric point) as used herein is the pH at which the net charge of a protein is zero. For polypeptides, the isoelectric point depends primarily on the dissociation constants (pKa) for the ionizable groups of seven charged amino acids: Glutamate (δ-carboxyl group), aspartate (ß-carboxyl group), cysteine (thiol group), tyrosine (phenol group), histidine (imidazole side chains), lysine (ε-ammonium group), arginine (guanidinium group) and terminal groups (NH2 and COOH). The tool uses the EMBOSS (Rice, 2000) pKa values:

| NH2 | COOH | C | D | E | H | K | R | Y |
|---|---|---|---|---|---|---|---|---|
| 8.6 | 3.6 | 8.5 | 3.9 | 4.1 | 6.5 | 10.8 | 12.5 | 10.1 |

[0395] A protein has its lowest solubility at its pI and for antibodies it is generally observed that increases in net positive charge of antibodies result in increased blood clearance and increased tissue retention with shorter half-life, whereas with lower pI antibodies have decreased tissue uptake and longer half-life. Therefore antibodies with a pI<7.6 or >8.4 get a tool score of −1 and antibodies with a pI between 7.6-8.4 get a tool score of +1.

[0396] The term “surface charge” as used herein is the prediction of the surface charge the hydrophobicity values of all amino acids changed to charge values:

[0397] D and E have a value of −1, K and R have a value of 1, H has a value of 0.1 and all other amino acids have a value of 0. For all surface residues the charge score is calculated.

[0398] For the scFv charge score the scores of all surface D, E, K, R, H residues of VH and VL are summed up. The tool score is +1 for a total charge score between −4.5 and 3.5 and the tool score is −1 for a total score<−4.5 and >3.5.

[0399] For the total CDR charge score the scores of all D, E, K, R, H residues of VH and VL CDRs are summed up. The tool score is +1 for a total CDR charge score between −2.1 and 1 and the tool score is −1 for a total score<−2.1 and >1.

[0400] For the negative CDR charge score the scores of all D, E residues of VH and VL CDRs are summed up. The tool score is +1 for a negative CDR charge score>−3.5 and the tool score is −1 for a total score<−4.5.

[0401] For the positive CDR charge score the scores of all D, E residues of VH and VL CDRs are summed up. The tool score is +1 for a positive CDR charge score<2.5 and the tool score is −1 for a total score<3.

[0402] In one aspect of the present invention the antibody or antigen-binding fragment or a substantially similar variant thereof can be used for a test-assay, either in a laboratory setup (e.g. a serological test for SARS-CoV-2 antigen) and/or in a quick-test-format.

[0403] In one aspect the present invention pertains to a humanized or a human therapeutic monoclonal antibody or antigen-binding fragment, or a substantially similar variant thereof, that binds specifically to SARS-CoV-2 glycoprotein S with the amino acid sequence of SEQ ID NO: 02 and neutralizes the infectious activity of SARS-CoV-2.

[0404] In another aspect the antibody or antigen-binding fragment or a substantially similar variant thereof is monoclonal.

[0405] In yet another aspect the antibody or antigen-binding fragment or a substantially similar variant thereof is a humanized or a human monoclonal antibody, or humanized or a human antigen-binding fragment thereof.

[0406] In another aspect the therapeutic antibody or antigen-binding fragment or a substantially similar variant thereof shows a neutralization of the infectious activity of SARS-CoV-2 which results in confluence score of at least 95% as measured with an infectious SARS-CoV-2 VERO E6 neutralizing assay.

[0407] In yet another aspect the therapeutic antibody or antigen-binding fragment or a substantially similar variant thereof has a specific binding to the RBD with a K_{D} of 65×10⁻⁹ M (65 nM) or less

[0408] In yet another aspect the therapeutic antibody or antigen-binding fragment or a substantially similar variant thereof binds specifically to an epitope within the receptor binding domain (RBD) of the S1 domain of SARS-CoV-2 glycoprotein (SEQ ID NO: 06) and binds specifically to at least one of the escape-mutations of the S1 domain of SARS-CoV-2 glycoprotein selected from the list consisting of S1-V367F, 51-N439K, 51-G4765, 51-V483A, 51-E484K, 51-G485R, S1-F486V, S1-7PM-mutant (SEQ ID NO: 1730), and any combination thereof.

[0409] In yet another aspect the therapeutic antibody or antigen-binding fragment or a substantially similar variant thereof binds specifically both to an epitope comprising the amino acids 400-FVIRGDEVRQIAPQTGKIADDYN-422 (SEQ ID NO: 1820) within the RBD (SEQ ID NO: 06) as well as to the S1-7PM-mutant (SEQ ID NO: 1730).

[0410] In yet another aspect the therapeutic antibody or antigen-binding fragment or a substantially similar variant thereof competes for binding to an epitope within the RBD (SEQ ID NO: 06) with an antibody comprising a heavy chain variable region of the amino acid sequence in SEQ ID NO: 926 and a light chain variable region of the amino acid sequence in SEQ ID NO: 928; and wherein the contamination ratio is less than 0.2.

[0411] In yet another aspect the therapeutic antibody or antigen-binding fragment or a substantially similar variant thereof has a contamination ratio of 0.1 or less, of 0.05 or less, of 0.025 or less or even of 0.001 or less.

[0412] In yet another aspect the therapeutic antibody or antigen-binding fragment or a substantially similar variant thereof competes for binding to the epitope 165-AKRVNCYFPLQSYGFQ-180 (SEQ ID NO: 1821) within the S1-7PM-mutant (SEQ ID NO: 1730) with an antibody comprising a heavy chain variable region of the amino acid sequence in SEQ ID NO: 1305; and a light chain variable region of the amino acid sequence in SEQ ID NO: 1309 or with an antibody comprising a heavy chain variable region of the amino acid sequence in SEQ ID NO: 926 and a light chain variable region of the amino acid sequence in SEQ ID NO: 928.

[0413] In yet another aspect the antibody or antigen-binding fragment or a substantially similar variant thereof competes for binding to the RBD-domain of the S1 domain of SARS-CoV-2 glycoprotein of SEQ ID No: 06 with the ACE2-receptor of the sequence depicted in SEQ ID NO: 08 in a competition assay.

[0414] In yet another aspect the antibody or antigen-binding fragment or a substantially similar variant thereof competes for binding to an epitope within an amino acid sequence selected from the group of SEQ ID No: 04 and/or SEQ ID No: 06 with an antibody comprising a heavy chain variable region of the amino acid sequence in SEQ ID NO: 406; and a light chain variable region of the amino acid sequence in SEQ ID NO: 408.

[0415] In yet another aspect the therapeutic antibody or antigen-binding fragment or a substantially similar variant thereof comprises:
[0416] a heavy chain CDR1 (H-CDR1) domain with an amino acid sequence selected from the group consisting of SEQ ID NO: 910, 350, 390, and 1306;
[0417] a heavy chain CDR2 (H-CDR2) domain with an amino acid sequence selected from the group consisting of SEQ ID NO: 912, 352, 392, and 1307;
[0418] a heavy chain CDR3 (H-CDR3) domain with an amino acid sequence selected from the group consisting of SEQ ID NO: 914, 354, 394, and 1308;
   and
[0419] a light chain CDR1 (L-CDR1) domain with an amino acid sequence selected from the group consisting of SEQ ID NO: 916, 356, 396, and 1310;
[0420] a light chain CDR2 (L-CDR2) domain with an amino acid sequence selected from the group consisting of SEQ ID NO: 918, 358, 398, and 1311;
[0421] a light chain CDR3 (L-CDR3) domain with an amino acid sequence selected from the group consisting of SEQ ID NO: 920, 360, 400, and 1312.

[0422] In yet another aspect the therapeutic antibody or antigen-binding fragment or a substantially similar variant thereof is selected from the group of antibodies comprising a heavy chain variable region of the amino acid sequence in SEQ ID NO: 926 and a light chain variable region of the amino acid sequence in SEQ ID NO: 928; a heavy chain variable region of the amino acid sequence in SEQ ID NO: 1305 and a light chain variable region of the amino acid sequence in SEQ ID NO: 1309; a heavy chain variable region of the amino acid sequence in SEQ ID NO: 366 and a light chain variable region of the amino acid sequence in SEQ ID NO: 368; and/or a heavy chain variable region of the amino acid sequence in SEQ ID NO: 406 and a light chain variable region of the amino acid sequence in SEQ ID NO: 408; and/or any combinations thereof.

[0423] In yet another aspect the therapeutic antibody or antigen-binding fragment or a substantially similar variant thereof comprises a heavy chain variable region of the amino acid sequence in SEQ ID NO: 1305 and a light chain variable region of the amino acid sequence in SEQ ID NO: 1309.

[0424] In yet another aspect the therapeutic antibody or antigen-binding fragment or a substantially similar variant thereof comprises:
[0425] a heavy chain CDR1 (H-CDR1) domain with an amino acid sequence selected from the group consisting of SEQ ID NO: 10, 30, 50, 70, 90, 110, 130, 150, 170, 190, 210, 230, 250, 270, 290, 310, 330, 350, 370, 390, 410, 430, 450, 470, 490, 510, 530, 550, 570, 590, 610, 630, 650, 670, 690, 710, 730, 750, 770, 790, 810, 830, 850, 870, 890, 910, 930, 950, 970, 990, 1110, 1130, 1150, 1170, 1190, 1210, 1230, 1250, 1270, 1290, 1298, 1306, 1314, 1322, 1330, 1338, 1346, 1354, 1362, 1370, 1378, 1386, 1394, 1402, 1410, 1418, 1426, 1434, 1442, 1450, 1458, 1466, 1474, 1482, 1490, 1498, 1506, 1514, 1522, 1530, 1538, 1546, 1554, 1562, 1570, 1578, 1586, 1594, 1602, 1610, 1618, 1626, 1634, 1642, 1650, 1658, 1666, 1674, 1682, 1690, 1698, 1706, 1714, and 1722;
[0426] a heavy chain CDR2 (H-CDR2) domain with an amino acid sequence selected from the group consisting of SEQ ID NO: 12, 32, 52, 72, 92, 112, 132, 152, 172, 192, 212, 232, 252, 272, 292, 312, 332, 352, 372, 392, 412, 432, 452, 472, 492, 512, 532, 552, 572, 592, 612, 632, 652, 672, 692, 712, 732, 752, 772, 792, 812, 832, 852, 872, 892, 912, 932, 952, 972, 992, 1112, 1132, 1152, 1172, 1192, 1212, 1232, 1252, 1272, 1291, 1299, 1307, 1315, 1323, 1331, 1339, 1347, 1355, 1363, 1371, 1379, 1387, 1395, 1403, 1411, 1419, 1427, 1435, 1443, 1451, 1459, 1467, 1475, 1483, 1491, 1499, 1507, 1515, 1523, 1531, 1539, 1547, 1555, 1563, 1571, 1579, 1587, 1595, 1603, 1611, 1619, 1627, 1635, 1643, 1651, 1659, 1667, 1675, 1683, 1691, 1699, 1707, 1715, and 1723;
[0427] a heavy chain CDR3 (H-CDR3) domain with an amino acid sequence selected from the group consisting of SEQ ID NO: 14, 34, 54, 74, 94, 114, 134, 154, 174, 194, 214, 234, 254, 274, 294, 314, 334, 354, 374, 394, 414, 434, 454, 474, 494, 514, 534, 554, 574, 594, 614, 634, 654, 674, 694, 714, 734, 754, 774, 794, 814, 834, 854, 874, 894, 914, 934, 954, 974, 994, 1114, 1134, 1154, 1174, 1194, 1214, 1234, 1254, 1274, 1292, 1300, 1308, 1316, 1324, 1332, 1340, 1348, 1356, 1364, 1372, 1380, 1388, 1396, 1404, 1412, 1420, 1428, 1436, 1444, 1452, 1460, 1468, 1476, 1484, 1492, 1500, 1508, 1516, 1524, 1532, 1540, 1548, 1556, 1564, 1572, 1580, 1588, 1596, 1604, 1612, 1620, 1628, 1636, 1644, 1652, 1660, 1668, 1676, 1684, 1692, 1700, 1708, 1716, and 1724;
   and
[0428] a light chain CDR1 (L-CDR1) domain with an amino acid sequence selected from the group consisting of SEQ ID NO: 16, 36, 56, 76, 96, 116, 136, 156, 176, 196, 216, 236, 256, 276, 296, 316, 336, 356, 376, 396, 416, 436, 456, 476, 496, 516, 536, 556, 576, 596, 616, 636, 656, 676, 696, 716, 736, 756, 776, 796, 816, 836, 856, 876, 896, 916, 936, 956, 976, 996, 1116, 1136, 1156, 1176, 1196, 1216, 1236, 1256, 1276, 1294, 1302, 1310, 1318, 1326, 1334, 1342, 1350, 1358, 1366, 1374, 1382, 1390, 1398, 1406, 1414, 1422, 1430, 1438, 1446, 1454, 1462, 1470, 1478, 1486, 1494, 1502, 1510, 1518, 1526, 1534, 1542, 1550, 1558, 1566, 1574, 1582, 1590, 1598, 1606, 1614, 1622, 1630, 1638, 1646, 1654, 1662, 1670, 1678, 1686, 1694, 1702, 1710, 1718, and 1726;
[0429] a light chain CDR2 (L-CDR2) domain with an amino acid sequence selected from the group consisting of SEQ ID NO: 18, 38, 58, 78, 98, 118, 138, 158, 178, 198, 218, 238, 258, 278, 298, 318, 338, 358, 378, 398, 418, 438, 458, 478, 498, 518, 538, 558, 578, 598, 618, 638, 658, 678, 698, 718, 738, 758, 778, 798, 818, 838, 858, 878, 898, 918, 938, 958, 978, 998, 1118, 1138, 1158, 1178, 1198, 1218, 1238, 1258, 1278, 1295, 1303, 1311, 1319, 1327, 1335, 1343, 1351, 1359, 1367, 1375, 1383, 1391, 1399, 1407, 1415, 1423, 1431, 1439, 1447, 1455, 1463, 1471, 1479, 1487, 1495, 1503, 1511, 1519, 1527, 1535, 1543, 1551, 1559, 1567, 1575, 1583, 1591, 1599, 1607, 1615, 1623, 1631, 1639, 1647, 1655, 1663, 1671, 1679, 1687, 1695, 1703, 1711, 1719, and 1727;
[0430] a light chain CDR3 (L-CDR3) domain with an amino acid sequence selected from the group consisting of SEQ ID NO: 20, 40, 60, 80, 100, 120, 140, 160, 180, 200, 220, 240, 260, 280, 300, 320, 340, 360, 380, 400, 420, 440, 460, 480, 500, 520, 540, 560, 580, 600, 620, 640, 660, 680, 700, 720, 740, 760, 780, 800, 820, 840, 860, 880, 900, 920, 940, 960, 980, 1000, 1120, 1140, 1160, 1180, 1200, 1220, 1240, 1260, 1280, 1296, 1304, 1312, 1320, 1328, 1336, 1344, 1352, 1360, 1368, 1376, 1384, 1392, 1400, 1408, 1416, 1424, 1432, 1440, 1448, 1456, 1464, 1472, 1480, 1488, 1496, 1504, 1512, 1520, 1528, 1536, 1544, 1552, 1560, 1568, 1576, 1584, 1592, 1600, 1608, 1616, 1624, 1632, 1640, 1648, 1656, 1664, 1672, 1680, 1688, 1696, 1704, 1712, 1720, and 1728.

[0431] In yet another aspect the therapeutic antibody or antigen-binding fragment or a substantially similar variant thereof comprises a variable heavy chain (V H) with an amino acid sequence selected from the group consisting of SEQ ID NO: 24, 44, 64, 84, 104, 124, 144, 164, 184, 204, 224, 244, 264, 284, 304, 324, 344, 364, 384, 404, 424, 444, 464, 484, 504, 524, 544, 564, 584, 604, 624, 644, 664, 684, 704, 724, 744, 764, 784, 804, 824, 844, 864, 884, 904, 924, 944, 964, 984, 1004, 1024, 1044, 1064, 1084, 1104, 1124, 1144, 1164, 1184, 1204, 1224, 1244, 1264, 1284, 1289, 1297, 1305, 1313, 1321, 1329, 1337, 1345, 1353, 1361, 1369, 1377, 1385, 1393, 1401, 1409, 1417, 1425, 1433, 1441, 1449, 1457, 1465, 1473, 1481, 1489, 1497, 1505, 1513, 1521, 1529, 1537, 1545, 1553, 1561, 1569, 1577, 1585, 1593, 1601, 1609, 1617, 1625, 1633, 1641, 1649, 1657, 1665, 1673, 1681, 1689, 1697, 1705, 1713, and 1721;
[0432] and
[0433] a variable light chain (VL) selected from the group consisting of SEQ ID NO: 22, 42, 62, 82, 102, 122, 142, 162, 182, 202, 222, 242, 262, 282, 302, 322, 342, 362, 382, 402, 422, 442, 462, 482, 502, 522, 542, 562, 582, 602, 622, 642, 662, 682, 702, 722, 742, 762, 782, 802, 822, 842, 862, 882, 902, 922, 942, 962, 982, 1002, 1022, 1042, 1062, 1082, 1102, 1122, 1142, 1162, 1182, 1202, 1222, 1242, 1262, 1282, 1293, 1301, 1309, 1317, 1325, 1333, 1341, 1349, 1357, 1365, 1373, 1381, 1389, 1397, 1405, 1413, 1421, 1429, 1437, 1445, 1453, 1461, 1469, 1477, 1485, 1493, 1501, 1509, 1517, 1525, 1533, 1541, 1549, 1557, 1565, 1573, 1581, 1589, 1597, 1605, 1613, 1621, 1629, 1637, 1645, 1653, 1661, 1669, 1677, 1685, 1693, 1701, 1709, 1717, and 1725.

[0434] The therapeutic antibody or antigen-binding fragment thereof comprises a heavy chain with an amino acid sequence selected from the group consisting of SEQ ID NO: 26, 46, 66, 86, 106, 126, 146, 166, 186, 206, 226, 246, 266, 286, 306, 326, 346, 366, 386, 406, 426, 446, 466, 486, 506, 526, 546, 566, 586, 606, 626, 646, 666, 686, 706, 726, 746, 766, 786, 806, 826, 846, 866, 886, 906, 926, 946, 966, 986, 1006, 1026, 1046, 1066, 1086, 1106, 1126, 1146, 1166, 1186, 1206, 1226, 1246, 1266, and 1286;
[0435] and
[0436] a light chain with an amino acid sequence selected from the group consisting of SEQ ID NO: 28, 48, 68, 88, 108, 128, 148, 168, 188, 208, 228, 248, 268, 288, 308, 328, 348, 368, 388, 408, 428, 448, 468, 488, 508, 528, 548, 568, 588, 608, 628, 648, 668, 688, 708, 728, 748, 768, 788, 808, 828, 848, 868, 888, 908, 928, 948, 968, 988, 1008, 1028, 1048, 1068, 1088, 1108, 1128, 1148, 1168, 1188, 1208, 1228, 1248, 1268, and 1288.

[0437] In yet another aspect the therapeutic antibody or antigen-binding fragment or a substantially similar variant thereof is characterized by one or more of the following:
[0438] I. capable of binding specifically to the S1-domain of SARS-CoV-2 Glycoprotein with an affinity (K_{D}) of 1.5×10⁻⁸ M or less, preferably less than 3×10⁻⁹ M,
[0439] II. capable of reducing or preventing an antibody-dependent enhancement (ADE) reaction in a patient,
[0440] III. capable of preventing, reducing or healing a viral infection with SARS-CoV-2,
[0441] IV. capable of reducing or preventing the cytokine storm syndrome (CSS) in a patient,
[0442] V. capable of reducing the load of viral particles in the sputum of a patient by at least 50% measured 48 hours after administration of the therapeutic antibody or antigen-binding fragment thereof.
[0443] VI. having an IC₅₀ of less than 0.036 μg/ml, preferably of 0.026 μg/ml or less.

[0444] In yet another aspect an isolated nucleic acid molecule encoding the therapeutic antibody or antigen-binding fragment is encompassed.

[0445] In yet another aspect an expression vector is encompassed comprising said nucleic acid molecule.

[0446] In yet another aspect a method of producing the therapeutic antibody or antigen-binding fragment or a substantially similar variant thereof is encompassed comprising the steps of
[0447] i. introducing the expression vector mentioned before into an isolated host cell,
[0448] ii. growing the cell under conditions permitting production of the antibody or antigen-binding fragment thereof,
[0449] iii. recovering the antibody or fragment so produced.

[0450] In yet another aspect a pharmaceutical composition is encompassed comprising said therapeutic antibody or antigen-binding fragment or a substantially similar variant thereof.

[0451] In yet another aspect said pharmaceutical composition further comprises at least a second therapeutic agent, wherein the second therapeutic agent is selected from antiviral drugs including Indinavir, Saquinavir, Lopinavir, Ritonavir, interferon-beta, Remdesivir, Favipiravir, Oseltamivir, Chloroquin, Hydroxychloroquin, Umifenovir; serine proteases, including TMPRSS2 or Camostatmesilat; antibiotics, including Linezolid, Azithromycin, Nemonoxacin or Fluorchinolone; interleukin-6-receptor-antagonists, including Tocilizumab or Sarilumab in mono-therapy or combined with Methotrexate; anti-parasite treatments, including Ivermectin; anticoagulants and any combination thereof.

[0452] In yet another aspect the therapeutic antibody or antigen-binding fragment or a substantially similar variant thereof according to present invention is for the use in the treatment of a SARS-CoV-2-related disease or condition in a patient.

[0453] In yet another aspect said SARS-CoV-2-related disease or condition is selected from the group comprising fever, cough, fatigue, shortness of breath, loss of smell and taste, pleurisy, pericarditis, lung consolidation, pulmonary oedema, pneumonia, serous exudation, fibrin exudation, pulmonary oedema, pneumocyte hyperplasia, large atypical pneumocytes, interstitial inflammation with lymphocytic infiltration and multinucleated giant cell formation, diffuse alveolar damage (DAD), diffuse alveolar exudates, acute respiratory distress syndrome (ARDS), severe hypoxemia, exudates in alveolar cavities and pulmonary interstitial fibrosis plasmocytosis in bronchoalveolar lavage (BAL), disseminated intravascular coagulation (DIC), leukoerythroblastic reaction, microvesicular steatosis in the liver, any symptom associated with COVID-19 and any combination thereof.

[0454] In yet another aspect the therapeutic antibody or antigen-binding fragment or a substantially similar variant thereof according to the present invention competes for binding to an epitope within an amino acid sequence selected from the group of SEQ ID No: 04 and/or SEQ ID No: 06 with an antibody selected from a group comprising a heavy chain variable region of the amino acid sequence in SEQ ID NO: 906 and a light chain variable region of the amino acid sequence in SEQ ID NO: 908; a heavy chain variable region of the amino acid sequence in SEQ ID NO: 926 and a light chain variable region of the amino acid sequence in SEQ ID NO: 928; a heavy chain variable region of the amino acid sequence in SEQ ID NO: 1066 and a light chain variable region of the amino acid sequence in SEQ ID NO: 1068; a heavy chain variable region of the amino acid sequence in SEQ ID NO: 1166 and a light chain variable region of the amino acid sequence in SEQ ID NO: 1168; a heavy chain variable region of the amino acid sequence in SEQ ID NO: 1305 and a light chain variable region of the amino acid sequence in SEQ ID NO: 1309; a heavy chain variable region of the amino acid sequence in SEQ ID NO: 366 and a light chain variable region of the amino acid sequence in SEQ ID NO: 368; and/or a heavy chain variable region of the amino acid sequence in SEQ ID NO: 406 and a light chain variable region of the amino acid sequence in SEQ ID NO: 408; and/or any combinations thereof.

[0455] In one embodiment said therapeutic antibody or antigen-binding fragment or a substantially similar variant thereof binds specifically to at least one epitope within the S1-7PM-mutant (SEQ ID NO.: 1730), selected from 365-YSFLY-369 (SEQ ID NO: 1822), 436-WNSKNLD-443 (SEQ ID NO: 1823), and/or 474-QASSTPCNGAKRVNCY-489 (SEQ ID NO: 1824) (the numbering of the residues corresponds to the numbering of the amino acids within the S1 domain of SARS-CoV-2 glycoprotein S, i.e. SEQ ID NO: 02).

[0456] In yet another embodiment said therapeutic antibody or antigen-binding fragment or a substantially similar variant thereof competes for binding to at least one epitope within the S1-7PM-mutant, selected from 365-YSFLY-369 (SEQ ID NO: 1822), 436-WNSKNLD-443 (SEQ ID NO: 1823), and/or 474-QASSTPCNGAKRVNCY-489 (SEQ ID NO: 1824) (the numbering of the residues corresponds to the numbering of the amino acids within the S1 domain of SARS-CoV-2 glycoprotein S, i.e. SEQ ID NO: 02) with the ACE2-rezeptor.

[0457] In yet another embodiment therapeutic said antibody or antigen-binding fragment or a substantially similar variant thereof binds specifically to and/or competes for binding to at least two and/or all three epitopes within the S1-7PM-mutant, selected from 365-YSFLY-369 (SEQ ID NO: 1822), 436-WNSKNLD-443 (SEQ ID NO: 1823), and/or 474-QASSTPCNGAKRVNCY-489 (SEQ ID NO: 1824) (the numbering of the residues corresponds to the numbering of the amino acids within the S1 domain of SARS-CoV-2 glycoprotein S, i.e. SEQ ID NO: 02) with the ACE2-rezeptor.

[0458] In yet another aspect said therapeutic antibody or antigen-binding fragment or a substantially similar variant thereof competes for binding to the epitope 483-VEGFNCYF-490 (SEQ ID NO: 1825) within the RBD of the S1 domain of SARS-CoV-2 glycoprotein S with an antibody comprising a heavy chain variable region of the amino acid sequence in SEQ ID NO: 926; and a light chain variable region of the amino acid sequence in SEQ ID NO: 928.

[0459] In yet another aspect said therapeutic antibody or antigen-binding fragment or a substantially similar variant thereof competes for binding to the epitope 483-VEGFNCYF-490 (SEQ ID NO: 1825) within the RBD of the S1 domain of SARS-CoV-2 glycoprotein S with an antibody selected from the group of antibodies comprising a heavy chain variable region of the amino acid sequence in SEQ ID NO: 1305 and a light chain variable region of the amino acid sequence in SEQ ID NO: 1309; a heavy chain variable region of the amino acid sequence in SEQ ID NO: 366 and a light chain variable region of the amino acid sequence in SEQ ID NO: 368; and/or a heavy chain variable region of the amino acid sequence in SEQ ID NO: 406 and a light chain variable region of the amino acid sequence in SEQ ID NO: 408; and/or any combinations thereof.

[0460] In yet another aspect said therapeutic antibody or antigen-binding fragment or a substantially similar variant thereof competes for binding to the epitope 437-NSNNLDSKVGGNYNYLYRLFRKSNLKP-463 (SEQ ID NO: 1811) within the RBD of the S1 domain of SARS-CoV-2 glycoprotein with an antibody comprising a heavy chain variable region of the amino acid sequence in SEQ ID NO: 926; and a light chain variable region of the amino acid sequence in SEQ ID NO: 928.

[0461] In yet another aspect said therapeutic antibody or antigen-binding fragment or a substantially similar variant thereof competes for binding to the epitope 437-NSNNLDSKVGGNYNYLYRLFRKSNLKP-463 (SEQ ID NO: 1811) within the RBD of the S1 domain of SARS-CoV-2 glycoprotein with an antibody selected from the group of antibodies comprising a heavy chain variable region of the amino acid sequence in SEQ ID NO: 1305 and a light chain variable region of the amino acid sequence in SEQ ID NO: 1309; a heavy chain variable region of the amino acid sequence in SEQ ID NO: 366 and a light chain variable region of the amino acid sequence in SEQ ID NO: 368; and/or a heavy chain variable region of the amino acid sequence in SEQ ID NO: 406 and a light chain variable region of the amino acid sequence in SEQ ID NO: 408; and/or any combinations thereof.

[0462] In yet another aspect said therapeutic antibody or antigen-binding fragment or a substantially similar variant thereof competes for binding to the epitope 400-FVIRGDEVRQIAPQTGKIADYN422 (SEQ ID NO: 1826) within the RBD of the S1 domain of SARS-CoV-2 glycoprotein with an antibody comprising a heavy chain variable region of the amino acid sequence in SEQ ID NO: 926; and a light chain variable region of the amino acid sequence in SEQ ID NO: 928.

[0463] In yet another aspect said therapeutic antibody or antigen-binding fragment or a substantially similar variant thereof competes for binding to the epitope 400-FVIRGDEVRQIAPQTGKIADYN422 (SEQ ID NO: 1826) within the RBD of the S1 domain of SARS-CoV-2 glycoprotein with an antibody selected from the group of antibodies comprising a heavy chain variable region of the amino acid sequence in SEQ ID NO: 1305 and a light chain variable region of the amino acid sequence in SEQ ID NO: 1309; a heavy chain variable region of the amino acid sequence in SEQ ID NO: 366 and a light chain variable region of the amino acid sequence in SEQ ID NO: 368; and/or a heavy chain variable region of the amino acid sequence in SEQ ID NO: 406 and a light chain variable region of the amino acid sequence in SEQ ID NO: 408; and/or any combinations thereof.

[0464] In yet another aspect said therapeutic antibody or antigen-binding fragment or a substantially similar variant thereof competes for binding to the epitope 470-TEIYQAGSTPC-480 (SEQ ID NO: 1827) within the RBD of the S1 domain of SARS-CoV-2 glycoprotein with an antibody comprising a heavy chain variable region of the amino acid sequence in SEQ ID NO: 926; and a light chain variable region of the amino acid sequence in SEQ ID NO: 928.

[0465] In yet another aspect said therapeutic antibody or antigen-binding fragment or a substantially similar variant thereof competes for binding to the epitope 470-TEIYQAGSTPC-480 (SEQ ID NO: 1827) within the RBD of the S1 domain of SARS-CoV-2 glycoprotein with an antibody selected from the group of antibodies comprising a heavy chain variable region of the amino acid sequence in SEQ ID NO: 1305 and a light chain variable region of the amino acid sequence in SEQ ID NO: 1309; a heavy chain variable region of the amino acid sequence in SEQ ID NO: 366 and a light chain variable region of the amino acid sequence in SEQ ID NO: 368; and/or a heavy chain variable region of the amino acid sequence in SEQ ID NO: 406 and a light chain variable region of the amino acid sequence in SEQ ID NO: 408; and/or any combinations thereof.

[0466] In yet another aspect said therapeutic antibody or antigen-binding fragment or a substantially similar variant thereof competes for binding to at least one or two or three or more of the epitopes selected from 483-VEGFNCYF-490 (SEQ ID NO: 1825), 437-NSNNLDSKVGGNYNYLYRLFRKSNLKP-463 (SEQ ID NO: 1811), 400-FVI RGDEVRQIAPQTGKIADYN-422 (SEQ ID NO: 1826), and/or 470-TEIYQAGSTPC-480 (SEQ ID NO: 1827) within the RBD of the S1 domain of SARS-CoV-2 glycoprotein S with an antibody comprising a heavy chain variable region of the amino acid sequence in SEQ ID NO: 926; and a light chain variable region of the amino acid sequence in SEQ ID NO: 928.

[0467] In yet another aspect said therapeutic antibody or antigen-binding fragment or a substantially similar variant thereof competes for binding to at least one or two or three or more of the epitopes selected from 483-VEGFNCYF-490 (SEQ ID NO: 1825), 437-NSNNLDSKVGGNYNYLYRLFRKSNLKP-463 (SEQ ID NO: 1811), 400-FVI RGDEVRQIAPQTGKIADYN-422 (SEQ ID NO: 1826), and/or 470-TEIYQAGSTPC-480 (SEQ ID NO: 1827) within the RBD of the S1 domain of SARS-CoV-2 glycoprotein S with an antibody selected from the group of antibodies comprising a heavy chain variable region of the amino acid sequence in SEQ ID NO: 1305 and a light chain variable region of the amino acid sequence in SEQ ID NO: 1309; a heavy chain variable region of the amino acid sequence in SEQ ID NO: 366 and a light chain variable region of the amino acid sequence in SEQ ID NO: 368; and/or a heavy chain variable region of the amino acid sequence in SEQ ID NO: 406 and a light chain variable region of the amino acid sequence in SEQ ID NO: 408; and/or any combinations thereof.

[0468] In yet another aspect said therapeutic antibody or antigen-binding fragment or a substantially similar variant thereof competes for binding to the S1-7PM-mutant (SEQ ID NO: 1730) of the 51 domain of SARS-CoV-2 glycoprotein with an antibody comprising a heavy chain variable region of the amino acid sequence in SEQ ID NO: 926; and a light chain variable region of the amino acid sequence in SEQ ID NO: 928.

[0469] In yet another aspect said therapeutic antibody or antigen-binding fragment or a substantially similar variant thereof competes for binding to the S1-7PM-mutant (SEQ ID NO: 1730) of the 51 domain of SARS-CoV-2 glycoprotein with an antibody selected from the group of antibodies comprising a heavy chain variable region of the amino acid sequence in SEQ ID NO: 1305 and a light chain variable region of the amino acid sequence in SEQ ID NO: 1309; a heavy chain variable region of the amino acid sequence in SEQ ID NO: 366 and a light chain variable region of the amino acid sequence in SEQ ID NO: 368; and/or a heavy chain variable region of the amino acid sequence in SEQ ID NO: 406 and a light chain variable region of the amino acid sequence in SEQ ID NO: 408; and/or any combinations thereof.

[0470] In yet another embodiment said therapeutic antibody or antigen-binding fragment or a substantially similar variant thereof competes for binding to at least two and/or all three epitopes within the S1-7PM-mutant, selected from 365-YSFLY-369 (SEQ ID NO: 1822), 436-WNSKNLD-443 (SEQ ID NO: 1823), and/or 474-QASSTPCNGAKRVNCY-489 (SEQ ID NO: 1824) (the numbering of the residues corresponds to the numbering of the amino acids within the S1 domain of SARS-CoV-2 glycoprotein S, i.e. SEQ ID NO: 02) with an antibody comprising a heavy chain variable region of the amino acid sequence in SEQ ID NO: 926; and a light chain variable region of the amino acid sequence in SEQ ID NO: 928.

[0471] In yet another embodiment said therapeutic antibody or antigen-binding fragment or a substantially similar variant thereof competes for binding to at least two and/or all three epitopes within the S1-7PM-mutant, selected from 365-YSFLY-369 (SEQ ID NO: 1822), 436-WNSKNLD-443 (SEQ ID NO: 1823), and/or 474-QASSTPCNGAKRVNCY-489 (SEQ ID NO: 1824) (the numbering of the residues corresponds to the numbering of the amino acids within the S1 domain of SARS-CoV-2 glycoprotein S, i.e. SEQ ID NO: 02) with an antibody selected from the group of antibodies comprising a heavy chain variable region of the amino acid sequence in SEQ ID NO: 1305 and a light chain variable region of the amino acid sequence in SEQ ID NO: 1309; a heavy chain variable region of the amino acid sequence in SEQ ID NO: 366 and a light chain variable region of the amino acid sequence in SEQ ID NO: 368; and/or a heavy chain variable region of the amino acid sequence in SEQ ID NO: 406 and a light chain variable region of the amino acid sequence in SEQ ID NO: 408; and/or any combinations thereof.

[0472] In yet another aspect said therapeutic antibody or antigen-binding fragment or a substantially similar variant thereof binds specifically to at least one, or two, or three, or more of the epitopes selected from 483-VEGFNCYF-490 (SEQ ID NO: 1825), 437-NSNNLDSKVGGNYNYLYRLFRKSNLKP-463 (SEQ ID NO: 1811), 400-FVIRGDEVRQIAPQTGKIADYN-422 (SEQ ID NO: 1826), and/or 470-TEIYQAGSTPC-480 (SEQ ID NO: 1827) within the RBD of the S1 domain of SARS-CoV-2 glycoprotein, and binds specifically to at least one, or two, or three, or more of the epitopes selected from 483-VEGFNCYF-490 (SEQ ID NO: 1825), 437-NSNNLDSKVGGNYNYLYRLFRKSNLKP-463 (SEQ ID NO: 1811), 400-FVIRGDEVRQIAPQTGKIADYN-422 (SEQ ID NO: 1826), and/or 470-TEIYQAGSTPC-480 (SEQ ID NO: 1827).

[0473] In yet another aspect said therapeutic antibody or antigen-binding fragment or a substantially similar variant thereof competes for binding to at least one, or two, or three, or more of the epitopes selected from 483-VEGFNCYF-490 (SEQ ID NO: 1825), 437-NSNNLDSKVGGNYNYLYRLFRKSNLKP-463 (SEQ ID NO: 1811), 400-FVIRGDEVRQIAPQTGKIADYN-422 (SEQ ID NO: 1826), and/or 470-TEIYQAGSTPC-480 (SEQ ID NO: 1827) within the RBD of the S1 domain of SARS-CoV-2 glycoprotein, and competes for binding to at least one, or two, or three, or more of the epitopes selected from 483-VEGFNCYF-490 (SEQ ID NO: 1825), 437-NSNNLDSKVGGNYNYLYRLFRKSNLKP-463 (SEQ ID NO: 1811), 400-FVIRGDEVRQIAPQTGKIADYN-422 (SEQ ID NO: 1826), and/or 470-TEIYQAGSTPC-480 (SEQ ID NO: 1827) with an antibody comprising a heavy chain variable region of the amino acid sequence in SEQ ID NO: 926; and a light chain variable region of the amino acid sequence in SEQ ID NO: 928.

[0474] In yet another aspect the therapeutic antibody or antigen-binding fragment or a substantially similar variant thereof according to the present invention comprises at least one of the CDRs selected from
[0475] a heavy chain CDR1 (H-CDR1) domain with an amino acid sequence of SEQ ID NO: 1306;
[0476] a heavy chain CDR2 (H-CDR2) domain with an amino acid sequence of SEQ ID NO: 1307;
[0477] a heavy chain CDR3 (H-CDR3) domain with an amino acid sequence of SEQ ID NO: 1308;
[0478] and
[0479] a light chain CDR1 (L-CDR1) domain with an amino acid sequence of SEQ ID NO: 1310;
[0480] a light chain CDR2 (L-CDR2) domain with an amino acid sequence of SEQ ID NO: 1311;
[0481] a light chain CDR3 (L-CDR3) domain with an amino acid sequence of SEQ ID NO: 1312.

[0482] In yet another aspect of the invention said therapeutic antibody or antigen-binding fragment or a substantially similar variant thereof competes for binding to an epitope within the receptor binding domain (RBD) of the S1 domain of SARS-CoV-2 glycoprotein (SEQ ID NO: 06) and binding specifically to the S1-7PM-mutant of SEQ ID No: 1730, with an antibody comprising a heavy chain variable region of the amino acid sequence in SEQ ID NO: 1305; and a light chain variable region of the amino acid sequence in SEQ ID NO: 1309 or with an antibody comprising a heavy chain variable region of the amino acid sequence in SEQ ID NO: 926 and a light chain variable region of the amino acid sequence in SEQ ID NO: 928.

[0483] In yet another aspect of the invention said therapeutic antibody or antigen-binding fragment or a substantially similar variant thereof competes for binding to the epitope 483-VEGFNCYFPLQSYGFQPTNGV-505 (SEQ ID NO: 1828) within the RBD (SEQ ID NO.: 6) and to the S1-7PM-protein of SEQ ID No.: 1730 with an antibody comprising a heavy chain variable region of the amino acid sequence in SEQ ID NO: 1305; and a light chain variable region of the amino acid sequence in SEQ ID NO: 1309 or with an antibody comprising a heavy chain variable region of the amino acid sequence in SEQ ID NO: 926 and a light chain variable region of the amino acid sequence in SEQ ID NO: 928.

[0484] In yet another aspect of the invention the therapeutic antibody or antigen-binding fragment or a substantially similar variant thereof binds specifically to the epitope 437-NSNNLDSKVGGNYNYLYRLFRKSNLKP-463 (SEQ ID NO: 1811) within the RBD (SEQ ID NO.: 6) and competes for binding to 483-VEGFNCYF-490 (SEQ ID NO: 1825) within the RBD of the S1 domain of SARS-CoV-2 glycoprotein and binds specifically to the S1-7PM-mutant (SEQ ID NO: 1730) of the S1 domain of SARS-CoV-2 glycoprotein.

[0485] In yet another aspect of the invention the therapeutic antibody or antigen-binding fragment or a substantially similar variant thereof binds specifically to the epitope 437-NSNNLDSKVGGNYNYLYRLFRKSNLKP-463 (SEQ ID NO: 1811) within the RBD (SEQ ID NO.: 6) with a K_{D} of 70 nM or less (“wild-type” RBD-mFc (i.e. RBD without point mutations) immobilized on an anti-Fmc capture surface) and shows a contamination ratio of 0.2 or less.

[0486] In yet another aspect of the invention the therapeutic antibody or antigen-binding fragment or a substantially similar variant thereof binds specifically to the RBD of the S1 domain of SARS-CoV-2 glycoprotein (SEQ ID NO.: 6) with a K_{D} of 70 nM or less (“wild-type” RBD-mFc (i.e. RBD without point mutations) immobilized on an anti-Fmc capture surface) and shows a contamination ratio of 0.2 or less.

[0487] In yet another aspect of the invention the therapeutic antibody or antigen-binding fragment or a substantially similar variant thereof binds specifically to the RBD of the S1 domain of SARS-CoV-2 glycoprotein (SEQ ID NO.: 6) with a K_{D} of 20 nM or less (“wild-type” RBD-mFc (i.e. RBD without point mutations) immobilized on an anti-Fmc capture surface) and shows a contamination ratio of 0.1 or less.

[0488] In yet another aspect of the invention the therapeutic antibody or antigen-binding fragment or a substantially similar variant thereof binds specifically to the RBD of the S1 domain of SARS-CoV-2 glycoprotein (SEQ ID NO.: 6) with a K_{D} of 70 nM or less (“wild-type” RBD-mFc (i.e. RBD without point mutations) immobilized on an anti-Fmc capture surface) and binds specifically to the S1-7PM-mutant (SEQ ID NO: 1730) with a K_{D} of 70 nM or less and shows a contamination ratio of 0.2 or less.

[0489] In yet another aspect of the invention the therapeutic antibody or antigen-binding fragment or a substantially similar variant thereof binds specifically to the RBD of the S1 domain of SARS-CoV-2 glycoprotein (SEQ ID NO.: 6) with a K_{D} of 10 nM or less (“wild-type” RBD-mFc (i.e. RBD without point mutations) immobilized on an anti-Fmc capture surface) and binds specifically to the S1-7PM-mutant (SEQ ID NO: 1730) with a K_{D} of 45 nM or less (antibody against 51-7PM was immobilized on a Protein A coated biosensor) and shows a contamination ratio of 0.1 or less.

[0490] In yet another aspect of the invention the therapeutic antibody or antigen-binding fragment or a substantially similar variant thereof binds specifically to the epitope 437-NSNNLDSKVGGNYNYLYRLFRKSNLKP-463 (SEQ ID NO: 1811) within the RBD (SEQ ID NO.: 6) with a K_{D} of 70 nM or less (“wild-type” RBD-mFc (i.e. RBD without point mutations) immobilized on an anti-Fmc capture surface) and binds specifically to the S1-7PM-mutant (SEQ ID NO: 1730) with a K_{D} of 45 nM or less (antibody against 51-7PM was immobilized on a Protein A coated biosensor) and shows a contamination ratio of 0.1 or less.

[0491] In yet another aspect therapeutic antibody or antigen-binding fragment or a substantially similar variant thereof is characterized by one or more of the following:
[0492] capable of binding specifically to the RBD of SARS-CoV-2 Glycoprotein S with an affinity (K_{D}) of 6.5×10−8 M or less, preferably less than 10×10-9 M,
[0493] capable of reducing or preventing an antibody-dependent enhancement (ADE) reaction in a patient,
[0494] capable of preventing, reducing or healing a viral infection with SARS-CoV-2, capable of reducing or preventing the cytokine storm syndrome (CSS) in a patient,
[0495] capable of reducing the load of viral particles in the sputum of a patient by at least 50% for at least 48 hours after administration of the therapeutic antibody or antigen-binding fragment thereof,
[0496] having a specific binding specifically to the S1-7PM-mutant (SEQ ID. 1730) with a K_{D} of less than 3×10⁻⁹ M,
[0497] having an IC₅₀ of less than 0.036 μg/ml, preferably of 0.026 μg/ml or less.

[0498] In another aspect the present invention pertains to an isolated nucleic acid molecule encoding said therapeutic antibody or antigen-binding fragment or a substantially similar variant thereof.

[0499] In another aspect the present invention pertains to an expression vector comprising said nucleic acid molecule.

[0500] In another aspect the present invention pertains to a method of producing the therapeutic antibody or antigen-binding fragment or a substantially similar variant thereof comprising the steps of
[0501] introducing said expression vector according into an isolated host cell,
[0502] growing the cell under conditions permitting production of the antibody or antigen-binding fragment thereof,
[0503] recovering the antibody or fragment so produced.

[0504] In one embodiment the antibody may be produced in the animal and/or human body, e.g. in a body cell, by using for example a stabilized mRNA, DNA, plasmid, viral vector or other vector enabling the production of the therapeutic antibody or antigen-binding fragment or a substantially similar variant thereof within the animal or human body.

[0505] In another aspect the present invention pertains to a pharmaceutical composition comprising the therapeutic antibody or antigen-binding fragment or a substantially similar variant, and a pharmaceutically acceptable carrier.

[0506] In another aspect the present invention pertains to a therapeutic antibody or antigen-binding fragment for the use in the prevention and/or treatment of a SARS-CoV-2-related disease or condition in a patient.

### SHORT DESCRIPTION OF THE FIGURES

[0507] FIG. 1a—Representative depiction of a SEC-HLPC-measurement of a therapeutic antibody according to the present invention. A single peak indicates a high purity (i.e. low contamination) of the antibody. In the depiction is only the peak of the monomer visible.

[0508] FIG. 1b—Representative depiction of a SEC-HLPC-measurement of a regular antibody in the prior art. Several peaks indicate the contamination with multimers and dimers besides the monomer. Such an antibody would not be suitable to be used as a therapeutic antibody due to undesired stimulatory effects on the host's immune system.

[0509] FIG. 2—Result of an infectious SARS-CoV-2 neutralizing assay (Confluent VERO E6-6-Test) with different antibodies. The higher the confluence the better the neutralizing activity of the antibody. For therapeutic purposes a confluence of at least 95% is desired.

[0510] FIG. 3—List of some of the antibodies of the present invention with germline VH and VL as well as their CDR-sequences. Depicted are inter alia the therapeutic antibodies: YU505-A01, YU505-A02, YU505-E01, YU505-F05, YU534-C12, YU534-D09, YU535-A02, YU536-D04, YU537-H08 and YU537-H11. YU505-A02, YU536-D04 and YU537-H11 are preferred therapeutic antibodies.

[0511] FIG. 4—Representation of the amino acid sequence of the VL and VH of the therapeutic antibodies YU505-A01 (a), YU505-A02 (b), YU505-E01 (c) and YU505-F05 (d). YU505-A02 (b) is useful both as a therapeutic antibody as well as a reference antibody. Any antibody competing with YU505-A02 (b) to the target epitope(s) is to be considered a useful therapeutic antibody according to the present invention.

[0512] FIG. 5—Representation of the scFv-sequences of antibody-fragments from YU505-A01 (a), YU505-A02 (b), YU505-E01 (c) and YU505-F05 (d).

[0513] FIG. 6—Representation of a test for “stickiness” of several therapeutic antibodies as compared with known antibodies. The lower the signal the smaller is the unspecific binding of the antibodies to undesired targets.

[0514] FIG. 7—Representation of a SEC-HPLC-measurement of the therapeutic antibodies YU505-A01 (a), YU505-A02 (b), YU505-E01 (c) and YU505-F05 (d). All antibodies show a high purity with a contamination ratio of well below 1. The peaks at time-points>10 are due to impurities of the column and not associated with the antibodies.

[0515] FIG. 8—Exemplary results of ACE2:RBD competition assay of some antibodies of the present invention at different concentrations. 100% represents no competition, 0% represents full competition. A competition of less than 70% at 0.5 μg/ml was considered necessary to qualify an antibody with sufficient activity for further testing.

[0516] FIG. 9—Depiction of the contamination ratio (i.e. multimerization) of a selection of antibodies of the present invention. Measurement was done by SEC-HPLC and the multimerization was compared with IVIGs. A contamination ratio of less than 1 was considered necessary to qualify an antibody for further testing.

[0517] FIG. 10—Depiction of the specificity of a selection of therapeutic human antibodies according to the invention. Note: The binding specifically to the different negative antigens was normalized to the binding of avelumab (a fully human monoclonal antibody medication for the treatment of Merkel cell carcinoma, urothelial carcinoma, and renal cell carcinoma).

[0518] FIG. 11—Depiction of effective neutralization of the virus and blocking of the entry of virus into mammalian cells at 1 μg/ml with different antibodies of the present invention. All depicted antibodies show sufficient neutralization to be considered for therapeutic use.

[0519] FIG. 12—Depiction of the effective blocking of the ACE2:RBD interaction site for a selection of inventive antibodies (all inventive antibodies were tested, data not shown). A blocking of at least 50% of the ACE2:RBD interaction site was considered necessary to qualify an antibody for further testing.

[0520] FIG. 13—Depiction of the effective IC₅₀-binding specifically to the RBD in subnanomolar range for a selection of inventive antibodies (all inventive antibodies were tested, data not shown). An IC50 of less than 0.2 nM was considered necessary to qualify an antibody for further testing. For YU505-A01 no saturation ELISA curve was detected.

[0521] FIG. 14—Depiction of the heat stability test determined by NanoDSF for a selection of inventive antibodies (all inventive antibodies were tested, data not shown). Melting T ranges from about 60° C. to about 70° C. Aggregation T ranges from about 68° C. to 81° C. An melting T of at least 65° C. and aggregation T of at least 70° C. was considered necessary to qualify an antibody for further testing.

[0522] FIG. 15—Depiction of the multimer-formation under stress conditions for a selection of inventive antibodies (all inventive antibodies were tested, data not shown). No increased multimer-formation of above 4% could be detected showing the overall suitability in terms of purity and stability of the inventive antibodies.

[0523] FIG. 16—IC₅₀ measurement in a VERO E6 cell assay for a number of antibodies according to the present invention (all inventive antibodies were tested, data not shown). YU536-D04 and YU537-H11 show a preferred IC₅₀-profile.

[0524] FIG. 17—Table depicting the results of the IC₅₀ measurement in a VERO E6 cell assay for a number of antibodies according to the present invention (all inventive antibodies were tested, data not shown). An IC₅₀ of less than 0.05 was considered necessary to qualify an antibody for further testing.

[0525] FIG. 18—Depiction of the antibody subfamily distribution in the universal HAL9/10 library (according to Kügler et al., 2015), the in vivo distribution of subfamilies (according to Tiller et al., 2013) and the distribution of antibodies against 51 selected from HAL9/10. (A) Abundance of VH. (B) Abundance of VK. (C) Abundance of VA.

[0526] FIG. 19—Depiction of the flow cytometry analysis to determine the inhibition efficacy. A) screening analysis to determine the inhibition efficacy of scFv-Fc antibodies on ACE2 positive cells using 1500 nM antibody and 50 nM spike protein (30:1 ratio). The antibodies chosen for later analysis are marked in colors. The antibodies STE73-9-G3 and STE73-7H10 (marked with *) were identical. B) IC₅₀ determination by flow cytometry using 50 nM S1-S2 trimer and 4.7-1500 nM antibodies. C) IC₅₀ determination by flow cytometry using 10 nM RBD and 0.03-1000 nM antibodies.

[0527] FIG. 20—The binding of 17 inhibiting antibodies were tested on RBD (with murine Fc part), 51 (with murine Fc part) or S1-S2 (with His tag) in titration ELISA to determine the EC₅₀. As controls, a control antibody with a murine Fc part (an antibody which binds specifically to c-myc), human HEK293 cell lysate, BSA and lysozyme was used.

[0528] FIG. 21—Depiction of the flow cytometry analysis to determine the inhibition efficacy of antibody combinations on ACE2 positive cells and 50 nM S1-S2 and 1500 nM as a single antibody, respectively 750 nM of each antibody in a combination.

[0529] FIG. 22—Depiction of the flow cytometry analysis to determine the inhibition efficacy.

[0530] FIG. 23—Depiction of the SEC data of antigen production in insect High Five cells (A-C) and mammalian Expi293F cells (D-E). The table (F) indicates the most likely conformation of the protein due to the retention volume of the peaks with the corresponding area in percentage.

[0531] FIG. 24—A) Depiction of the flow cytometry inhibition analysis of spike S1-S2 trimer (50 nM in relation to monomer) binding specifically to living cells expressing ACE2 blocked by 1500 nM antibodies and B) Depiction of RBD-mFc (10 nM in relation to monomer) binding specifically to living cells expressing ACE2 blocked by 100 nM antibody. The antibodies STE72-1G5, STE72-4C10, STE72-8E1 and STE73-6C8 were used as example. The background control are transfected ACE2 cells and the reference are ACE2 positive cells incubated with labeled spike protein.

[0532] FIG. 25—Depiction of a flow cytometry inhibition analysis. Comparison of the inhibition of spike protein and RBD by flow cytometry on ACE2 positive Expi293F cells using 1000 nM scFv-Fc and 50 nM spike protein, respectively RBD (20:1 ratio). A) Inhibition of RBD binding in comparison of Expi293F transiently expressing ACE2 and Calu-3 cells. B) Inhibition of spike S1-S2 binding in comparison of Expi293F transiently expressing ACE2 and Calu-3. As negative control, an antibody which binds specifically to N-cadherin of Danio rerio was used.

[0533] FIG. 26—Overview on inhibiting antibodies. V-genes were determined by VBASE2 (vbase2.org) (Mollova et al., 2010). The EC₅₀ were measured on 30 ng immobilized RBD-mFc, S1-mFc, S1-S2-His (trimer) by ELISA. The IC₅₀ was measured by flow cytometry using 50 nM (in relation to monomer) S1-S2 trimer, respectively 10 nM RBD and ACE2 positive cells. The molar ration of antibody binding site: S1-S2 or RBD is given for 50% inhibition. N.D.: not determinable.

[0534] FIG. 27—Depiction of the result of an infectious SARS-CoV-2 neutralizing assay (Confluent VERO E6-6-Test) with different antibodies

[0535] FIG. 28—Table depicting the results of the IC₅₀ measurement in a VERO E6 cell assay for a number of antibodies according to the present invention.

[0536] FIG. 29—IC₅₀ measurement in a VERO E6 cell assay for a number of antibodies according to the present invention. STE90-C11 shows a preferred IC₅₀-profile.

[0537] FIG. 30—a) The result of the binding study according to example 11 with antibody STE90-C11 of the present invention to the 8 “escape”-mutants. The binding was also compared to other reported antibodies CB6, RGN10933, RGN10987, CR3022. It could be shown that the inventive antibody STE90-C11 shows significant better binding specifically to all 7 single-point “escape”-mutants as compared to reference antibodies, and diminished, but still detectable binding specifically to the seven point mutation “S1-7PM”. b) Same measurement but the depiction is in nM-concentration.

[0538] FIG. 31—The result of the binding study of the S1-protein with the seven single-point “escape” mutants as well as the seven point mutation “S1-7PM” to the ACE2-domain. This shows that all “escape”-mutants still bind to ACE2 and therefore are able to infect host-cells despite a significant altered RBD.

[0539] FIG. 32—The result of the binding study according to example 11 with a selection of antibodies of the present invention to the 8 “escape”-mutants. The binding was also compared to other reported antibodies CB6, RGN10933, RGN10987, CR3022. It could be shown that the inventive antibodies show significant better binding specifically to all 7 single-point “escape”-mutants as compared to reference antibodies, and partially diminished, but still detectable binding specifically to the seven point mutation “51-7PM”.

[0540] FIG. 33—Depiction of the results of the “binning study” according to example 11. “COM1”, “COM2” and “COM3” refer to different bins (“BIN 1”, “BIN 2”, “BIN 3”), i.e. antibodies belonging to the same COM or bin compete with each other. All preferred therapeutic antibodies belong to “COM1” and compete with reference antibody YU505-A02.

[0541] FIG. 34—Depiction of the results of K_{D}—measurements of a number of antibodies according to the present invention as well as two comparative antibodies against different point mutations as well as the S1-7PM-mutation. The measurements were done as described in example 13 (BLI), the antibody was immobilized on a Protein A coated biosensor.

[0542] FIG. 35—EC₅₀-analysis with STE90-C11 against a plurality of different single, double and triple RBD-mutants. Most mutants were still bound significantly, however, a reduction of binding could be seen for mutants K417N, K417T, N501Y, E484K/N501Y, B.1.1.7.

[0543] FIG. 36—Results of the selection pressure experiment as described further in example 18. With the Palivizumab control the wild-type virus is the prevailing virus form, whereas with the antibody STE90-C11 the K417T-mutant prevailed. This indicates that growth of wild-type virus and other virus mutants was significantly suppressed by STE90-C11.

[0544] FIG. 37—Depiction of a surface depiction on interaction sites on the RBD. STE90-C11 shows a large interaction surface on the RBD (light grey), much bigger even than the interaction surface of ACE2 (dark grey). This explains, why STE90-C11 binds to most RBD-escape mutants. Furthermore most ACE2-interaction-sites a covered by the STE90-C11-interaction surface, thus explaining the good inhibition of ACE2-RBD-interaction and, ultimately, the good virus suppression.

[0545] FIG. 38—Binding study of YU536-D04 and YU537-H11 to some “critical mutants” which were not bound that good by STE90-C11. It turns out that YU536-D04 and YU537-H11 bind to N501Y and K417N-mutant with similar binding quality as to wild-type RBD.

[0546] FIGS. 39-42—Results of animal studies in hamsters and mice as described in example 17.

[0547] FIG. 39—Viral load in lungs of hamsters was reduced from about 10⁶ to about 10⁴ after 3 days of infection and reduced from about 10⁶ to about 10² after 5 days of infection when 37 mg/kg STE90-C11 was injected into the animals. Lower dosage of 3.7 mg/kg reduced also the viral load, but was not enough to eradicate the virus.

[0548] FIG. 40—Change of body weight of hamsters was used as health-indicator. Hamsters treated with 37 mg/kg STE90-C11 recovered quicker and earlier (already from day 3 after injection) and never lost as much weight as control groups. Since hamsters are prone to mild to moderate COVID-19 infections, this indicates that mild to moderate COVID-19 infections may be either avoided or at least attenuated and accelerated.

[0549] FIG. 41—Viral load in lungs of K18hACE2 mice was reduced from about 10⁶ to about 10² after 5 days of infection both with 6 mg/kg as well as 60 mg/kg of STE90-C11 injected into the animals. Interestingly already the lower dosage of 6 mg/kg reduces the viral load sufficiently in mice. A) Control vs. 60 mg/kg STE90-C11; B) Control vs. 6 mg/kg STE90-C11.

[0550] FIG. 42—Change of body weight of K18hACE2 mice was used as health-indicator. Mice treated with 6, 30, 60, 120 mg/kg STE90-C11 recovered quicker and earlier (already from day 3 after injection) and never lost as much weight as control group (in which some mice died). Since K18hACE2 mice are prone to severe COVID-19 infections, this indicates that severe COVID-19 infections may be either avoided or at least attenuated and accelerated and chances of death are significantly reduced.

[0551] FIG. 43—Amino acid sequence alignment of heavy and light chain of the two antibodies STE90-C11 and YU536-D04 using Clustal™ software (version Omega). The high sequence identity shows that the antibodies of the invention form a structural and functional related cluster of antibodies with outstanding performance, especially with respect to the binding to escape mutants.

[0552] FIG. 44—Amino acid sequence alignment of heavy and light chain of the two antibodies STE90-C11 and YU536-D04 with the third antibody YU537-H11 using Clustal™ software. YU537-H11 is more distant related to STE90-C11 and YU536-D04, however, again the sequence similarity (including conservative and semi-conservative amino acid exchanges) shows again that the antibodies of the invention form a structural and functional related cluster of antibodies with outstanding performance, especially with respect to the binding to escape mutants.

[0553] FIG. 45—Binding study with STE90-C11 against the “Indian mutant” (triple mutation: L452R+E484Q+D614G). The binding profile is very similar to the binding profile of said antibody against wild-type RBD.

[0554] FIG. 46—“Chain shuffling experiment”: A hybrid-antibody comprising the heavy chain from YU536-D04 and the light chain from STE90-C11 was tested for its binding ability to wild-type RBD and different mutants. It turned out that the binding was as good as the binding with STE90-C11 (and even better in case of K417N).

### EXAMPLES

### Example 1: Antigen Production

[0555] As antigens of the full-length SARS-CoV-2 glycoprotein S (Spike) (SEQ ID NOs: 01 & 02), full-length S1-subunit of the SARS-CoV-2 glycoprotein S (SEQ ID NOs: 03 & 04), full-length of receptor binding domain (RBD) of the S1-subunit of SARS-CoV-2 glycoprotein S (SEQ ID NOs: 05 & 06), and the extra-cellular domain of human ACE2 (full-length human ACE2: SEQ ID NOs: 07 & 08) were produced by conventional recombinant methods or ordered by external providers.

[0556] For some applications the antigens were further modified to result in active fragments or by attachment of a HIS-tag.

### 1.1 Design of Expression Vectors

[0557] Production in Expi293F cells was performed using pCSE2.5-His-XP, pCSE2.6-hFc-XP or pCSE2.6-mFc-XP (Jager et al., 2013) where the respective single chain variable fragment of the antibodies or antigens were inserted by NcoI/NotI (NEB Biolabs) digestion. Antigen production in High Five insect cells was performed using NcoI/NotI compatible variants of the OpiE2 plasmid (Bleckmann et al., 2015) containing an N-terminal signal peptide of the mouse Ig heavy chain, the respective antigen and C-terminal either 6×His-tag, hFc or mFc.

### 1.2 Production of Antigens in Insect Cells

[0558] Different domains or subunits of the Spike protein (GenBank: MN908947) and the extracellular domain of ACE2 were Baculovirus-free produced in High Five cells (Thermo Fisher Scientific) by transient transfection as previously described in Bleckmann et al. (Bleckmann et al., 2019). Briefly, High Five cells were cultivated at 27° C., 110 rpm in ExCell 405 media (Sigma) and kept at a cell density between 0.3-5.5×106 cells/mL. For transfection cells were centrifuged and resuspended in fresh media to a density of 4×106 cells/mL and transfected with 4 μg plasmid/mL and 16 μg/mL of PEI 40 kDa (Polysciences). 4 h up to 24 h after transfection cells were fed with 75% of the transfection volume. At 48 h after transfection cell culture medium was doubled. Cell supernatant was harvested five days after transfection in a two-step-centrifugation (4 min at 180×g and 20 min at above 3500×g) and 0.2 μm filtrated for purification.

1.3 Production of Antigens and scFv-Fc in Mammalian Cells

[0559] Antibodies, different domains or subunits of the Spike protein and the extracellular domain of ACE2 were produced in Expi293F cells (Thermo Fisher Scientific). Expi293F cells were cultured at 37° C., 110 rpm and 5% CO2 in Gibco FreeStyle F17 expression media (Thermo Fisher Scientific) supplemented with 8 mM Glutamine and 0.1% Pluronic F68 (PAN Biotech). At the day of transfection cell density was between 1.5-2×10⁶ cells/mL and viability at least above 90%. For formation of DNA:PEI complexes 1 μg DNA/mL transfection volume and 5 μg of 40 kDa PEI (Polysciences) were first diluted separately in 5% transfection volume in supplemented F17 media. DNA and PEI was then mixed and incubated ˜25 min at RT before addition to the cells. 48 h later the culture volume was doubled by feeding HyClone SFM4Transfx-293 media (GE Healthcare) supplemented with 8 mM Glutamine. Additionally, HyClone Boost 6 supplement (GE Healthcare) was added with 10% of the end volume. One week after transfection supernatant was harvested by 15 min centrifugation at 1500×g.

### 1.4 Protein Purification

[0560] Protein purification was done depending on the production scale in 24 well filter plate with 0.5 mL resin (10 mL scale) or 1 mL column on Äkta Go (GE Healthcare), Äkta Pure (GE Healthcare) or Profina System (BIO-RAD). MabSure Select (GE Healthcare) was used as resign for Protein A purification. For His-tag purification of Expi293F supernatant HisTrap FF Crude column (GE Healthcare) and for His-tag purification of insect cell supernatant HisTrap excel column (GE Healthcare) was used. All purifications were performed according to the manufactures manual. Indicated antigens were further purified by size exclusion chromatography by a 16/600 Superdex 200 kDa pg (GE Healthcare). All antigens, antibodies and scFv-Fc were run on Superdex 200 Increase 10/300GL (GE Healthcare) on Äkta or HPLC (Techlab) on an AdvanceBio SEC300 Å 2.7 μm, 7.8×300 mm (Agilent) for quality control.

### 1.5 Validation of Spike Protein Binding Specifically to ACE2

[0561] ACE2 binding specifically to the produced antigens was confirmed in ELISA and on cells in cytometer.

[0562] For ELISA 200 ng ACE2-mFc per well was immobilized on a Costar High binding 96 well plate (Corning) at 4° C. over night. Next, the wells were blocked with 350 μL 2% MBPST (2% (w/v) milk powder in PBS; 0.05% Tween20) for 1 h at RT and then washed 3 times with MilliQ-H2O and 0.05% Tween20 (Tecan Hydro Speed). Afterwards, the respective antigen was added at the indicated concentrations and incubated 1 h at RT prior to another 3 times washing step. Finally, the antigen was detected using mouse-anti-polyHis conjugated with horseradish peroxidase (HRP) (A7058, Sigma) for His-tagged antigens, goat-anti-mIgG(Fc) conjugated with HRP (A0168, Sigma) for mFc tagged antigen versions or goat-anti-hIgG(Fc) conjugated with HRP (A0170, Sigma) if hFc-tagged antigens had to be detected. Bound antigens were visualized with tetramethylbenzidine (TMB) substrate (20 parts TMB solution A (30 mM Potassium citrate; 1% (w/v) Citric acid (pH 4.1)) and 1 part TMB solution B (10 mM TMB; 10% (v/v) Acetone; 90% (v/v) Ethanol; 80 mM H2O2 (30%)) were mixed). After addition of 1 N H2SO4 to stop the reaction, absorbance at 450 nm with a 620 nm reference was measured in an ELISA plate reader (Epoch, BioTek).

[0563] To verify the ACE2-antigen interaction on living cells, Expi293F cells were transfected according to the protocol above using pCSE2.5-ACE2f I-His and 5% eGFP plasmid. Two days after transfection purified 51-S2-His, S1-His or RBD-His was labeled using Monolith NT™ His-Tag Labeling Kit RED-tris-NTA (Nanotemper) according to the manufacturer's protocol. Fc-tagged versions were labeled indirectly by using goat-anti-mFc-APC (Dianova) or mouse anti-hFcgamma-APC (Biolegend) antibody. 100, 50 and 25 nM of antigen were incubated with 5×105 ACE2 expressing or non-transfected Expi293F cells (negative control) 50 min on ice. After two washing steps fluorescence was measured in MACSQuant Analyzer (Miltenyi Biotec.).

### 1.6 Production of SARS CoV2 Spike Domains or Subunits and Human ACE2 in Insect Cells and Mammalian Cells

[0564] SARS-CoV-2 RBD-SD1 (aa319-591) according to Wrapp et al. 2020 (Wrapp et al., 2020b), 51 subunit (aa14-694), S1-S2 (aa14-1210, with proline substitutions at position 986 and 987 and “GSAS” substitution at the furin site) and extracellular ACE2 were produced in insect cells using a plasmid based baculovirus free system (Bleckmann et al., 2019) as well as in Expi293F cells. All antigens with exception of S1-S2 were produced with human IgG1 Fc part, murine IgG2a Fc part or with 6×His tag in both expression systems. S1-S2 was only produced with 6×His tag. The extracellular domain of ACE2 was produced with human IgG1 Fc part in Expi293F cells and 6×His tagged in insect cells. The yields of all produced proteins are given in table 3. The proteins were analyzed by size exclusion chromatography (SEC).

[0565] S1 as well as S1-S2 were produced in higher amounts in insect cells compared to Expi293F cells. RBD was produced well in both production systems. The binding of the produced spike domains/proteins to ACE2 was validated by ELISA and flow cytometry analysis on ACE2 positive cells.

[0566] Maximum production yields of SARS-CoV-2 spike protein/domains and human ACE2 in insect cells (High Five) and mammalian cells (Expi293F). Proteins with His-tag produced in High Five cells and S1-hFc* were additionally purified by SEC. * with Furin site.

TABLE 3
Binding Results.

| | High Five cells | | | | Expi293F cells | | | |
|---|---|---|---|---|---|---|---|---|
| | | | Binding | | | | Binding | |
| | | | specifically | Binding | | | specifically | Binding |
| | | | to ACE2 in | to ACE2 | | | to ACE2 | to ACE2 |
| | Yield | | ELISA | on cells | Yield | | in ELISA | on cells |
| RBD-hFc | 90 | mg/L | yes | yes | 203 | mg/L | yes | yes |
| RBD-mFc | 48 | mg/L | yes | yes | 116 | mg/L | yes | yes |
| RBD-His | 92 | mg/L | yes | yes | 35 | mg/L | yes | yes |
| S1-hFc* | 7 | mg/L | yes | yes | <1 | mg/L | no | no |
| S1-hFc | 50 | mg/L | yes | yes | <1 | mg/L | weak | yes |
| S1-mFc | 36 | mg/L | yes | yes | <1 | mg/L | yes | yes |
| S1-His | 15 | mg/L | yes | yes | <1 | mg/L | weak | no |
| S1-S2-His | 8 | mg/L | yes | yes | <1 | mg/L | no | no |

| | | | | | | | |
|---|---|---|---|---|---|---|---|
| ACE2-hFc | tbd | — | — | 82.8 | mg/L | — | — |
| ACE2-mFc | tbd | — | — | 18.6 | mg/mL | — | — |

| | | | | | | | |
|---|---|---|---|---|---|---|---|
| ACE-His | 1 | mg/L | — | — | — | — | — |

### Example 2: Production of Therapeutic Antibodies

[0567] For identification of antibodies a phage-display technique was applied. As libraries a naïve fab library as well as an immune library was used. S1-HIS was used as immobilized target. As counter selection streptavidin, IVIGs and protein N standard were used.

[0568] In total 192 clones from lambda and kappa selection were isolated. 48 sequence clusters with blocking antibodies were identified.

[0569] The number of clones was reduced for IgG conversion based on a rational approach: From each cluster at least one antibody was selected. From large clusters two clones were selected.

[0570] The following steps were performed to deselect regular antibodies, which are not suitable as therapeutic antibodies:
[0571] Step 1: Deselection of antibodies with not acceptable post-translational modifications (PTMs) (i.e. unpaired cysteines & glycosylations)
[0572] Step 2: Remaining clones were selected based on number of developability flags
[0573] Step 3: Clones with identical number of flags were selected based on ACE2:RBD inhibition
[0574] Step 4: Clones with similar ACE2:RBD inhibition were selected based on binding characteristics (i.e. RBD & S1-S2 binding was preferred over RBD binding only).

### 2.1 Antibody Selection Using Phage Display

[0575] The antibody selection was performed as follows: For the panning procedure, the antigen was immobilized on a Costar High binding 96 well plate (Corning). 5 μg of 51-hFc (produced in High Five cells) was diluted in carbonate puffer (50 mM NaHCO₃, pH 9.6) and coated in the wells at 4° C. overnight. Next, the wells were blocked with 350 μL % MBPST (2% (w/v) milk powder in PBS; 0.05% Tween20) for 1 h at RT and then washed 3 times with PBST (PBS; 0.05% Tween20).

[0576] Before adding the libraries to the coated wells, the libraries (5×1010 phage particles) were preincubated with 2% MPBST on blocked wells for 1 h at RT. The libraries were transferred to the coated wells, incubated for 2h at RT and washed 10 times. Bound phage was eluted with 150 μL trypsin (10 μg/mL) at 37° C. and was used for the next panning round.

[0577] The eluted phage solution was transferred to a 96 deep well plate (Greiner Bio-One, Frickenhausen, Germany) and incubated with 145 μL E. coli TG1 (0D600=0.5) firstly for 30 min at 37° C., then 30 min at 37° C. and 650 rpm to infect the phage particles. 1 mL 2×YT-GA (1.6% (w/v) Tryptone; 1% (w/v) Yeast extract; 0.5% (w/v) NaCl (pH 7.0), 100 mM D-Glucose, 100 μg/mL ampicillin) was added and incubated for 1 h at 37° C. and 650 rpm, followed by addition of 1×1010 cfu M13KO7 helper phage.

[0578] Subsequently, the infected bacteria were incubated for 30 min at 37° C. followed by 30 min at 37° C. and 650 rpm before centrifugation for 10 min at 3220×g.

[0579] The supernatant was discarded and the pellet resuspended in fresh 2×YT-AK (1.6% (w/v) Tryptone; 1% (w/v) Yeast extract; 0.5% (w/v) NaCl (pH 7.0), 100 μg/mL ampicillin, 50 μg/mL kanamycin). The phage antibodies were amplified overnight at 30° C. and 650 rpm and used for the next panning round. In total four panning rounds were performed. In each round, the stringency of the washing procedures was increased (20× in panning round 2, 30× in panning round 3, 40× in panning round 4) and the amount of antigen was reduced (2.5 μg in panning round 2, 1.5 μg in panning round 3 and 1 μg in panning round 4). After the fourth, respectively third panning round, the titer plate was used to select monoclonal antibody clones for the screening ELISA or for batch cloning to pCSE2.6-hIgG1-Fc-XP.

[0580] Antibody selection strategies using the human naive antibody gene libraries HAL9/10. n.a.=not applicable.

| Antibody | | | | binders/ | | cloned | |
|---|---|---|---|---|---|---|---|
| selection | | | panning | screened | unique | as | inhibiting |
| campaign | library | target | rounds | clones | antibodies | scFv-Fc | antibodies |
| STE70 | HAL9/10 | S1-hFc | 4 | 7/94 | 7 | 7 | 1 |
| | | (Hi5) | | | | | |
| STE72 | HAL10 | S1-hFc | 4 | 397/752 | 90 | 44 | 8 |
| | (kappa) | (Hi5) | | | | | |
| STE73 | HAL9 | S1-hFc | 4 | 519/846 | 209 | 59 | 8 |
| | (lambda) | (Hi5) | | | | | |
| STE77 | HAL10 | S1-hFc | 4 | 7/564 | 2 | n.a. | n.a. |
| | (kappa) | (Expi) | | | | | |
| STE78 | HAL9 | S1-hFc | 4 | 10/282 | 1 | n.a. | n.a. |
| | (lambda) | (Expi) | | | | | |

2.2 Screening of Monoclonal Recombinant Binders Using E. coli scFv Supernatant

[0581] Soluble antibody fragments (scFv) were produced in 96-well MTPs with polypropylene (U96 PP, Greiner Bio-One). 150 μL 2×YT-GA was inoculated with the bacteria bearing scFv expressing phagemids. MTPs were incubated overnight at 37° C. and 800 rpm in a MTP shaker (Thermoshaker PST-60HL-4, Lab4You, Berlin, Germany). A volume of 140 μL 2×YT-GA in a PP-MTP well was inoculated with 10 μL of the overnight culture and grown at 37° C. and 800 rpm until bacteria reached an OD600 of 0.5. Bacteria were harvested by centrifugation for 10 min at 3220×g and the supernatant was discarded. To induce expression of the antibody genes, the pellets were resuspended in 150 μL 2×YT supplemented with 100 μg/mL ampicillin and 50 μM isopropyl-beta D thiogalacto pyranoside (IPTG) and incubated at 30° C. and 800 rpm overnight. Bacteria were pelleted by centrifugation for 10 min at 3220×g and 4° C. The scFv-containing supernatant was transferred to a new PP-MTP and stored at 4° C. before ELISA analysis.

[0582] For the ELISA, 100 ng of antigen was coated on 96 well microtiter plates (MaxiSorp, Thermo Fisher Scientific) in PBS (pH 7.4) overnight at 4° C. After coating, the wells were washed three times with PBST and blocked with 2% MPBST for 1 h at RT, followed by three washing steps with PBST. Supernatants containing monoclonal scFv were mixed with 2% MPBST (1:2) and incubated in the antigen coated plates for 1.5 h at RT followed by three PBST washing cycles. Bound scFv were detected using murine mAb 9E10 which recognizes the C-terminal c-myc tag (1:50 diluted in 2% MPBST) and a goat anti-mouse serum conjugated with horseradish peroxidase (HRP) (A0168, Sigma) (1:50,000 dilution in 2% MPBST).

[0583] Bound antibodies were visualized with tetramethylbenzidine (TMB) substrate (20 parts TMB solution A (30 mM Potassium citrate; 1% (w/v) Citric acid (pH 4.1)) and 1 part TMB solution B (10 mM TMB; 10% (v/v) Acetone; 90% (v/v) Ethanol; 80 mM H2O2 (30%)) were mixed). After stopping the reaction by addition of 1 N H2SO4, absorbance at 450 nm with a 620 nm reference was measured in an ELISA plate reader (Epoch, BioTek). Monoclonal binders were sequenced and analyzed using VBASE2 (www.vbase2.org) (Mollova et al., 2010).

### 2.3 Inhibition of S1-S2 Binding Specifically to ACE2 Expressing Cells Using MacsQuant

[0584] The inhibition tests in cytometer on EXPI293F cells were performed based on the protocol for validation of spike protein binding specifically to ACE2 (see above) but only binding specifically to 51-S2-His antigen (High Five cell produced) was analysed. The assay was done in two setups. In the first setup 50 nM antigen was incubated with min. 1 μM of different scFv-Fc and the ACE2 expressing cells. The resulting median antigen fluorescence of GFP positive living single cells was measured. For comparison of the different scFv-Fc first the median fluorescence background of cells without antigen was subtracted, second it was normalized to the antigen signal where no antibody was applied. All scFv-Fc showing an inhibition in this setup were further analysed by titration (max. 1500 nM-4.7 nM) on S1-S2-His (High Five cell produced). The IC₅₀ was calculated using the equation f(x)=Amin+(Amax−Amin)/(1+(×0/×)\hat{ }h)\hat{ }s and parameters from Origin. In addition, pairwise combinations (max. 750 nM of each scFv-Fc) of the different inhibiting scFv-Fc were tested.

2.4 Characterization of the scFv-Fc in Titration ELISA

[0585] The ELISA were performed as described above in “Screening of monoclonal recombinant binders using E. coli scFv supernatant”. For titration ELISA the purified scFv-hFc were titrated from 10 μg/mL-0.001 μg/mL on S1-S2-His (High Five cell produced), RBD-mFc (High Five cell produced), S1-mFc (High Five cell produced). In addition, all 10 μg/μL scFv-hFc were also tested for cross reactivity on Expi293F cell lysate, BSA and lysozyme. The scFv-hFc were detected using goat-anti-hIgG(Fc)-HRP (A0170, Sigma). Titration assays were performed using 384 well microtiter plates using Precision XS microplate sample processor (BioTek), EL406 washer dispenser (BioTek) and BioStack Microplate stacker (BioTek). EC50 were calculated with by GraphPad Prism Version 6.1) fitting to a four-parameter logistic curve).

### 2.5 Selection of Antibodies by Phage Display

[0586] Antibodies were selected against 51 in four panning rounds in microtiter plates. The complete S1 subunit was used for antibody generation to ensure a native conformation of the RBD. The antibody screening by antigen ELISA was performed with soluble monoclonal scFv produced in E. coli in 96 well MTPs. Subsequently, binders were DNA sequenced and unique antibodies were recloned as scFv-Fc. Three pannings were performed. In a first approach the lambda (HAL9) and kappa (HAL10 library) were combined and the antigen S1-hFc (with Furin site, produced in High Five cells) was immobilized in PBS.

[0587] In the second approach, the pannings were performed separately for HAL10 and HAL9 using S1-hFc (with Furin site, produced in High Five cells) immobilized in carbonate buffer. Here, unique antibodies were selected from HAL10 and from HAL9.

[0588] In a third approach, 51-hFc produced in Expi293F cells was used. Here, the panning resulted in only three unique antibodies and these antibodies were not further analyzed in inhibition assays.

[0589] The Antibody subfamily distribution was analyzed and compared to the subfamily distribution in the HAL9/10 library and in vivo. Antibodies were selected covering the main gene VH gene families VH1 and VH3 whereas only few antibodies were selected using VH4. From the selected antibodies the V-gene VH3-23 was selected 96×. Therefore, this V-gene was used in 30% of the antibodies. In case of the lambda, the V-gene distribution is similar the distribution in the library. Here, it's only the V-gene VL6-57. For kappa, VK2 and VK4 are underrepresented compared to the library.

2.6 Transient Production of Anti-SARS-CoV-2 scFv-Fc in Mammalian Cells

[0590] Because of throughput issues only a selection of the unique antibodies was chosen for production. In addition, antibodies with glycosylation sites in the CDRs were excluded from the production as scFv-Fc because of developability issues. From all antibodies some antibodies were further produced as scFv-Fc in 5 mL scale. The production yields were in the range of 20-440 mg/L.

### 2.7 Antibodies Inhibit the Binding of 51 to ACE2 Positive Cells

[0591] The inhibition was measured by flow cytometry using ACE2 positive cells and labelled S1-S2 trimer. The spike protein was used for this inhibition assay to mimic the viral binding specifically to ACE2 positive cells. In a first screening step, all cloned antibodies were measured with 1500 nM antibodies (molar ration antibody: S1-S2 30:1) and antibodies with minimum ˜75% inhibition were selected for further analysis.

[0592] In a next step, the inhibiting antibodies were further tested in different concentrations from 1500 nM to 4.7 nM (molar ratio 30:1 to ˜1:10) in the cell based flow cytometry assay. The results of these inhibitions assays are given in FIG. 2B and table 4. The antibodies showed 50% inhibition with molar ratios of antibody binding site (antibody arm) to spike monomer of 0.8:1 to 13:1. The best antibodies showed 50% inhibition with a molar ration of 0.8 antibody arms to 1 spike (monomer). To validate these results, we performed the inhibition ELISA also on RBD in the cell based flow cytometry assay because RBD-mFc can be used in a lower amount of 10 nM in this assay (FIG. 2C). With the exception of two antibodies all antibodies show a good inhibition of RBD with best molar ratios of 0.3-0.6.

[0593] The inhibition of the antibodies was validated on human Calu-3 cells which are ACE2 positive using RBD and S1-S2 showing a stronger inhibition on Calu-3 compared to the transiently overexpressing ACE2 positive Exp293Fi cells. The Expi293F system allowed the better discrimination between the degree of inhibition when using the complete S1-S2 spike protein, because the S1-S2 is directly labelled with a fluorophore and the signals are not amplified in comparison to RBD with a murine Fc and a secondary fluorophore labelled antibody. This assay also showed, that all inhibiting antibodies selected against 51 are binding RBD.

### 2.8 Determination of the EC50 of the Inhibiting Antibodies

[0594] The EC50 was measured by titration ELISA for the inhibiting antibodies on RBD, S1 and S1-S2 spike (FIG. 3). It was shown, that all inhibiting antibodies bound RBD. The best antibodies showed a half maximal binding at 0.7 nM, respectively 0.6 nM, on RBD. The EC50 values were slightly different between binding specifically to RBD or S1 subunit. The EC50 on S1-S2 spike was reduced for some of the antibodies compared to RBD or 51.

### 2.9 Synergistic Effects of Antibody Combinations

[0595] The best antibodies were tested in the flow cytometry inhibition assay in pairwise combinations using 1500 nM antibody and 50 nM spike. Here, the combinations showed an improved inhibition compared to the single antibodies. The most antibody combinations were chosen using a lineage tree analysis (Genious Tree Builder) to reduce the amount of combinations to be tested.

[0596] The following therapeutic antibodies as depicted in SEQ ID NOs 9 to 1288 were finally identified. In another round of experiments the further antibodies as depicted in SEQ ID NOs 1289 to 1728 were finally identified.

[0597] For reference please be referred to table 4, which lists sequences segment (e.g. CDR, VL, etc.), sequence type (DNA or Protein “PRT”), antibody-Name and SEQ ID NO of the first three antibodies.

TABLE 4
Reference of antibodies and SEQ ID NOS

| | | | SEQ | | SEQ | | SEQ |
|---|---|---|---|---|---|---|---|
| Sequence | | Antibody- | ID | Antibody- | ID | Antibody- | ID |
| Segment | Type | Name | NO. | Name | NO. | Name | NO. |
| CDR1 of heavy | DNA | YU535-C09 | 9 | YU537-B05 | 29 | YU534-H01 | 49 |
| chain (H-CDR1) | | | | | | | |
| CDR1 of heavy | PRT | YU535-C09 | 10 | YU537-B05 | 30 | YU534-H01 | 50 |
| chain (H-CDR1) | | | | | | | |
| CDR2 of heavy | DNA | YU535-C09 | 11 | YU537-B05 | 31 | YU534-H01 | 51 |
| chain (H-CDR2) | | | | | | | |
| CDR2 of heavy | PRT | YU535-C09 | 12 | YU537-B05 | 32 | YU534-H01 | 52 |
| chain (H-CDR2) | | | | | | | |
| CDR3 of heavy | DNA | YU535-C09 | 13 | YU537-B05 | 33 | YU534-H01 | 53 |
| chain (H-CDR3) | | | | | | | |
| CDR3 of heavy | PRT | YU535-C09 | 14 | YU537-B05 | 34 | YU534-H01 | 54 |
| chain (H-CDR3) | | | | | | | |
| CDR1 of light | DNA | YU535-C09 | 15 | YU537-B05 | 35 | YU534-H01 | 55 |
| chain (L-CDR1) | | | | | | | |
| CDR1 of light | PRT | YU535-C09 | 16 | YU537-B05 | 36 | YU534-H01 | 56 |
| chain (L-CDR1) | | | | | | | |
| CDR2 of light | DNA | YU535-C09 | 17 | YU537-B05 | 37 | YU534-H01 | 57 |
| chain (L-CDR2) | | | | | | | |
| CDR2 of light | PRT | YU535-C09 | 18 | YU537-B05 | 38 | YU534-H01 | 58 |
| chain (L-CDR2) | | | | | | | |
| CDR3 of light | DNA | YU535-C09 | 19 | YU537-B05 | 39 | YU534-H01 | 59 |
| chain (L-CDR3) | | | | | | | |
| CDR3 of light | PRT | YU535-C09 | 20 | YU537-B05 | 40 | YU534-H01 | 60 |
| chain (L-CDR3) | | | | | | | |
| variable light | DNA | YU535-C09 | 21 | YU537-B05 | 41 | YU534-H01 | 61 |
| chain (VL) | | | | | | | |
| variable light | PRT | YU535-C09 | 22 | YU537-B05 | 42 | YU534-H01 | 62 |
| chain (VL) | | | | | | | |
| variable heavy | DNA | YU535-C09 | 23 | YU537-B05 | 43 | YU534-H01 | 63 |
| chain (VH) | | | | | | | |
| variable heavy | PRT | YU535-C09 | 24 | YU537-B05 | 44 | YU534-H01 | 64 |
| chain (VH) | | | | | | | |
| complete light | DNA | YU535-C09 | 25 | YU537-B05 | 45 | YU534-H01 | 65 |
| chain (L) | | | | | | | |
| complete light | PRT | YU535-C09 | 26 | YU537-B05 | 46 | YU534-H01 | 66 |
| chain (L) | | | | | | | |
| complete heavy | DNA | YU535-C09 | 27 | YU537-B05 | 47 | YU534-H01 | 67 |
| chain (H) | | | | | | | |
| complete heavy | PRT | YU535-C09 | 28 | YU537-B05 | 48 | YU534-H01 | 68 |
| chain (H) | | | | | | | |

[0598] Corresponding to the same consecutive pattern outlined in table 4, the further antibodies correspond to the following SEQ ID NOs as outlined in tables 5 to 7:

TABLE 5
Further references of antibodies and corresponding SEQ ID NOs

| Antibody | SEQ ID | Antibody | SEQ ID | Antibody | SEQ ID |
|---|---|---|---|---|---|
| Name | NOs | Name | NOs | Name | NOs |
| YU534-F11 | 69-88 | YU534-D06 | 269-288 | YU534-F06 | 469-488 |
| YU536-C01 | 89-108 | YU536-E07 | 289-308 | YU534-C05 | 489-508 |
| YU535-A06 | 109-128 | YU534-B03 | 309-328 | YU534-D09 | 509-528 |
| YU535-D12 | 129-148 | YU534-D10 | 329-348 | YU535-C06 | 529-548 |
| YU534-C09 | 149-168 | YU536-D04 | 349-368 | YU535-A09 | 549-568 |
| YU534-C12 | 169-188 | YU537-B08 | 369-388 | YU535-G09 | 569-588 |
| YU535-A02 | 189-208 | YU537-H11 | 389-408 | YU536-H01 | 589-608 |
| YU535-E07 | 209-228 | YU534-A11 | 409-428 | YU536-H05 | 609-628 |
| YU536-E12 | 229-248 | YU534-G06 | 429-448 | YU535-G02 | 629-648 |
| YU537-E03 | 249-268 | YU534-H02 | 449-468 | YU535-G11 | 649-668 |

TABLE 6
Further references of antibodies and corresponding SEQ ID NOs

| Antibody | SEQ ID | Antibody | SEQ ID | Antibody | SEQ ID |
|---|---|---|---|---|---|
| Name | NOs | Name | NOs | Name | NOs |
| YU534-B11 | 669-688 | YU534-G10 | 869-888 | YU505-E02 | 1069-1088 |
| YU534-C10 | 689-708 | YU505-A01 | 889-908 | YU505-E04 | 1089-1108 |
| YU535-D10 | 709-728 | YU505-A02 | 909-928 | YU505-F03 | 1109-1128 |
| YU535-B02 | 729-748 | YU505-A05 | 929-948 | YU505-F04 | 1129-1148 |
| YU534-D07 | 749-768 | YU505-B03 | 949-968 | YU505-F05 | 1149-1168 |
| YU537-H08 | 769-788 | YU505-B04 | 969-988 | YU519-A01 | 1169-1188 |
| YU534-E01 | 789-808 | YU505-B06 | 989-1008 | YU519-A09 | 1189-1208 |
| YU534-C02 | 809-828 | YU505-D01 | 1009-1028 | YU519-B05 | 1209-1228 |
| YU534-C06 | 829-848 | YU505-D02 | 1029-1048 | YU519-C01 | 1229-1248 |
| YU536-C12 | 849-868 | YU505-E01 | 1049-1068 | YU519-E03 | 1249-1268 |
| | | | | YU519-E12 | 1269-1288 |

TABLE 7
Further references of antibodies and corresponding SEQ ID NOs

| Antibody | SEQ ID | Antibody | SEQ ID | Antibody | SEQ ID |
|---|---|---|---|---|---|
| Name | NOs | Name | NOs | Name | NOs |
| PHE162-D2 | 1289-1296 | STE91-B1-B3 | 1473-1480 | STE72-2G4 | 1657-1664 |
| STE90-A10 | 1297-1304 | STE94-A1 | 1481-1488 | STE73-2B2 | 1665-1672 |
| STE90-C11 | 1305-1312 | STE94-B2 | 1489-1496 | STE73-2C2 | 1673-1680 |
| STE90-D7 | 1313-1320 | STE94-D3 | 1497-1504 | STE73-2E9 | 1681-1688 |
| STE90-G2 | 1321-1328 | STE94-E3 | 1505-1512 | STE73-2G8 | 1689-1696 |
| STE90-B1-A10 | 1329-1336 | STE94-E9 | 1513-1520 | STE73-6B10 | 1697-1704 |
| STE90-B1-B4 | 1337-1344 | STE94-F6 | 1521-1528 | STE73-6C1 | 1705-1712 |
| STE90-B1-D1 | 1345-1352 | STE94-F7 | 1529-1536 | STE73-6C8 | 1713-1720 |
| STE90-B1-D6 | 1353-1360 | STE94-F12 | 1537-1544 | STE73-9G3 | 1721-1728 |
| STE90-B1-F8 | 1361-1368 | STE94-H2 | 1545-1552 | | |
| STE90-B2-A1 | 1369-1376 | STE94-B1-D1 | 1553-1560 | | |
| STE90-B2-B3 | 1377-1384 | STE94-B1-E12 | 1561-1568 | | |
| STE90-B2-C5 | 1385-1392 | STE94-B2-B1 | 1569-1576 | | |
| STE90-B2-D12 | 1393-1400 | STE94-B2-B6 | 1577-1584 | | |
| STE90-B2-E6 | 1401-1408 | STE94-B2-E11 | 1585-1592 | | |
| STE90-B3-B10 | 1409-1416 | STE70-1E12 | 1593-1600 | | |
| STE90-B3-H3 | 1417-1424 | STE72-1B6 | 1601-1608 | | |
| STE90-B3-H6 | 1425-1432 | STE72-1G5 | 1609-1616 | | |
| STE91-C4 | 1433-1440 | STE72-4C10 | 1617-1624 | | |
| STE91-D4 | 1441-1448 | STE72-4E12 | 1625-1632 | | |
| STE91-F6 | 1449-1456 | STE72-8A2 | 1633-1640 | | |
| STE91-F10 | 1457-1464 | STE72-8A6 | 1641-1648 | | |
| STE91-B1-A10 | 1465-1472 | STE72-8E1 | 1649-1656 | | |

[0599] In one embodiment from these antibodies YU505-A01 (SEQ ID NOs: 889-908), YU505-A02 (SEQ ID NOs: 909-928), YU505-E01 (SEQ ID NOs: 1049-1068) and YU505-F05 (SEQ ID NOs: 1149-1168) have been selected for further characterization.

[0600] In a further embodiment from these antibodies YU534-009 (SEQ ID Nos: 149-168), YU534-C12 (SEQ ID NOs: 169-188), YU534-D09 (SEQ ID NOs: 509-528), YU535-A02 (SEQ ID NOs: 189-208), YU536-D04 (SEQ ID NOs: 349-368), YU537-H08 (SEQ ID NOs: 769-788) and YU537-H11 (SEQ ID NOs: 389-408) have been selected for further characterization.

[0601] The CDR-sequences of these four antibodies are also depicted in FIG. 3, their VL and VH-sequences are depicted in FIGS. 4a to 4d. The scFv DNA-sequences of fragments of these antibodies are depicted in FIGS. 5a to 5d.

### Example 3: Binding and Competition Assays

[0602] Different binding characteristics of the four antibodies were analyzed.

| | | ACE2:RBD- | ACE2:RBD- | |
|---|---|---|---|---|
| | | competition at [5 | competition at [0.5 | |
| Name | Specificity | μg/ml antibody] | μg/ml antibody] | K_{D} |
| YU505-A01 | RBD binding | less than 30% of | less than 60% of | 3.41 × 10⁻⁹ |
| | | ACE2 bound to RBD | ACE2 bound to RBD | |
| YU505-A02 | RBD binding | less than 30% of | less than 60% of | 1.07 × 10⁻⁸ |
| | | ACE2 bound to RBD | ACE2 bound to RBD | |
| YU505-E01 | RBD binding | less than 25% of | less than 50% of | 4.84 × 10⁻⁹ |
| | | ACE2 bound to RBD | ACE2 bound to RBD | |
| YU505-F05 | RBD + S1 | less than 30% of | less than 60% of | 1.31 × 10⁻⁸ |
| | binding | ACE2 bound to RBD | ACE2 bound to RBD | |

### Example 4: Infectious SARS-CoV-2 Neutralizing Assay (Confluent VERO E6-Test)

[0603] Antibodies were diluted in culture medium and mixed with 50 μl (500 TCID50) SARS-CoV-2 for 1 hour. The mixture was then added to VERO E6 cells. As controls cells were grown either with medium only or with the SARS-CoV-2 mixture without adding any antibody. Cells were incubated for 1 hour, after which the cells were washed and further incubated in medium for 3d and 18h.

[0604] In another embodiment antibodies were diluted in 1:10-steps and mixed with 5 μl (50 TCID50) SARS-CoV-2-virus. The mix is then added to the cells. Cells are washed after 1 h and incubated with methyl-cellulose-containing medium. After 3 days single plaques become visible within the cell layer, which can be counted.

[0605] Confluence of cells was measured at 4 dpi (cf. FIG. 2).

TABLE 8
Result of Infectious SARS-CoV-2 neutralizing
assay (Confluent VERO E6-Test)

| | Confluence Score in VERO |
|---|---|
| Antibody | E6 cell assay |
| YU505-A01 | >99% |
| YU505-A02 | >99% |
| YU505-E01 | >98% |
| YU505-F05 | >95% |

### Example 5: SEC-HLPC of Specific Ab

[0606] Size-exclusion HPLC was performed with the four antibodies YU505-A01, YU505-A02, YU505-E01 and YU505-F05.

[0607] YU505-A01 and YU505-E01 showed no, YU505-A02 and YU505-F05 showed only a very small agglutination-peak (the peaks at time-points>10 are contaminations of the column), confirming the usability of the antibodies for therapeutic application.

[0608] See also FIG. 7.

### Example 6: Specificity ELISA

[0609] In a specificity ELISA the “stickiness” of some antibodies was compared with Avelumab-control.

[0610] Mean S/N stickiness (test antibodies vs. Avelumab) was below 1 for YU505-A01 (about 0.5), YU505-A02 (about 0.6) and YU505-E01 (about 0.8).

[0611] See table 9 and FIG. 6.

TABLE 9
Results of Specificity ELISA

| | YU505-F05 | YU505-E01 | YU505-A01 | YU505-A02 | Trastuzumab | |
|---|---|---|---|---|---|---|
| DNA | 0.3 | 0.3 | 0.2 | 0.3 | 0.4 | |
| LPS | 1.3 | 1.1 | 0.9 | 0.8 | 1.5 | |
| Lysozyme | 1.1 | 1.4 | 0.7 | 0.9 | 1.0 | |
| Cell lysate | 1.7 | 0.4 | 0.2 | 0.2 | 0.3 | |
| Mean | 1.1 | 0.8 | 0.5 | 0.6 | 0.8 | |
| stickyness | | | | | | |
| Stdev. | 0.6 | 0.5 | 0.4 | 0.4 | 0.5 | |
| stickyness | | | | | | |
| | Trastuzumab | | Palivizumab | | | 2% |
| | (silenced Fc) | Palivizumab | (silenced Fc) | IVIGs | Avelumab | BSA−T |
| DNA | 0.6 | 0.3 | 0.5 | 0.6 | 1.0 | 0.1 |
| LPS | 1.2 | 1.3 | 1.2 | 3.9 | 1.0 | 0.8 |
| Lysozyme | 0.6 | 0.8 | 0.9 | 0.7 | 1.0 | 0.3 |
| Cell lysate | 0.2 | 0.3 | 0.3 | 0.3 | 1.0 | 0.1 |
| Mean | 0.7 | 0.7 | 0.7 | 1.4 | 1.0 | 0.3 |
| stickyness | | | | | | |
| Stdev. | 0.4 | 0.5 | 0.4 | 1.7 | 0.0 | .03 |
| stickyness | | | | | | |

Please note:
Values >1.0 indicate increased ″stickyness″ compared to Avelumab

### Example 7: Melting Temperature Analysis

[0612] Antibodies were analyzed by nanoDSF which uses tryptophan or tyrosin fluorescence to monitor protein unfolding in terms of effect on the onset melting temperature (T_{m onset}), the melting temperature (Tₘ) and aggregation temperature (T_{agg}) of the target protein.

[0613] 10 Antibodies were tested, the target assay concentration was 0.15 mg/ml, the assay buffer was 1×PBS pH 7.4, assay samples were prepared by diluting the target protein from its stock to the given concentration in assay buffer, all samples were stored at −80° C. prior to the experiment phase.

[0614] The experiments were performed on a Prometheus NT.48™ device equipped with additional back reflection options for detection of target protein aggregation. The technical parameters were as follows: The LED-sensitivity was set at 50% (the capillary scan indicated that 50% LED intensity resulted in sufficient intrinsic fluorescence of the targets), the temperature range was 20-95° C., the heating speed 1° C./min. The capillary type was a “high sensitivity”-type. The ratio 350/330 nm was used for protein unfolding (Tₘ) and onset of protein unfolding (T_{m onset}). Back onset, scattering for sample aggregation (T_{agg}).

[0615] All samples showed comparable fluorescence signals. No protein aggregation was observed at the starting temperature of 20° C., indicated by scattering signals (crosses) around 80 mAU.

[0616] Measurements were done in duplicates and the mean as well as the error deviation was calculated. Data were analyzed using the PR. ThermalControl™ v2.0.4 software from Nanotemper Technologies™.

[0617] The results of the analysis are summarized in Table 10.

TABLE 10
Summary of results of Tₘ onset, Tₘ₁, Tₘ₂, and T_{agg} for the tested antibodies:

| Sample | Tₘ onset | Tm1 | Tm2 | Tagg |
|---|---|---|---|---|
| YU505-A01 | 61.6 ± 0.1° C. | 68.8 ± 0.1° C. | 81.9 ± 0.1° C. | 71.3 ± 0.1° C. |
| YU505-A02 | 60.1 ± 0.2° C. | 70.0 ± 0.2° C. | 79.7 ± 0.1° C. | 78.6 ± 0.2° C. |
| YU505-E01 | 57.1 ± 0.3° C. | 60.3 ± 0.0° C. | 68.2 ± 0.1° C. | 68.4 ± 0.1° C. |
| YU505-F05 | 57.3 ± 0.3° C. | 64.5 ± 0.0° C. | 81.6 ± 0.1° C. | 69.5 ± 0.3° C. |
| YU534-C12 | 65.3 ± 0.8° C. | 69.5 ± 0.0° C. | 81.4 ± 0.7° C. | 71.2 ± 0.0° C. |
| YU534-D09 | 62.4 ± 0.1° C. | 68.9 ± 0.0° C. | 81.4 ± 0.1° C. | 69.9 ± 0.0° C. |
| YU535-A02 | 62.2 ± 0.1° C. | 70.8 ± 0.2° C. | 81.9 ± 0.2° C. | 75.9 ± 0.0° C. |
| YU536-D04 | 62.4 ± 0.0° C. | 69.3 ± 0.1° C. | 80.9 ± 0.0° C. | 81.2 ± 0.3° C. |
| YU537-H08 | 56.9 ± 0.2° C. | 62.1 ± 0.2° C. | 68.0 ± 0.2° C. | 70.1 ± 0.1° C. |
| YU537-H11 | 63.7 ± 0.0° C. | 70.8 ± 0.2° C. | — | 71.7 ± 0.2° C. |

### Example 8: Further Characteristics of the Antibodies

[0618] Antibodies were further characterized regarding ACE2:RBD-inhibition, isoelectric point (pI) of human IgG, hydrophobicity and charge. The results are outlined in table 11.

TABLE 11
Further characteristics of the antibodies

| | ACE2:RBD | | | | | | |
|---|---|---|---|---|---|---|---|
| | inhibition | | | | | | |
| | with | pI | Germinality | Germinality | Total | CDR | CDR |
| | 5 μg/ml | human | Index | Index VL | hydrophobicity | hydrophobicity | charge |
| Antibody | IgG [%] | IgG | VH [%] | [%] | score | score | total |
| YU535-C09 | | 8.11 | 91.9 | 96.9 | 4.09 | 1.28 | −1.03 |
| YU537-B05 | | 8.3 | 99.1 | 100 | 4 | 1.94 | −0.49 |
| YU534-H01 | | 8.21 | 99.1 | 99 | 3.26 | 1.23 | −0.6 |
| YU534-F11 | | 8.01 | 96.3 | 97 | 3.7 | 1.6 | 0.15 |
| YU536-C01 | | 8.11 | 98.2 | 99 | 3.89 | 1.23 | −1.36 |
| YU535-A06 | | 8.11 | 97.2 | 100 | 2.73 | 0.45 | −0.63 |
| YU535-D12 | | 8.21 | 97.2 | 99 | 3.22 | 0.58 | −0.49 |
| YU534-C09 | | 8.11 | 84.4 | 100 | 5.08 | 2.09 | −0.83 |
| YU534-C12 | | 8.21 | 99.1 | 96 | 4.36 | 1.84 | 0.3 |
| YU535-A02 | | 8.3 | 99.1 | 98 | 2.82 | 0.46 | −0.7 |
| YU535-E07 | | 8.3 | 97.2 | 99 | 2.96 | 0.79 | −0.6 |
| YU536-E12 | | 7.74 | 97.2 | 100 | 3.9 | 0.47 | −1.45 |
| YU537-E03 | | 7.88 | 96.3 | 99 | 3.9 | 0.75 | −0.89 |
| YU534-D06 | | 7.88 | 97.2 | 100 | 3.56 | 1.47 | −1.71 |
| YU536-E07 | | 8.11 | 98.1 | 100 | 4.31 | 1.17 | −0.1 |
| YU534-B03 | | 7.74 | 97.2 | 99 | 4.3 | 0.87 | −1.24 |
| YU534-D10 | | 8 | 98.1 | 99 | 4.52 | 1.3 | −0.14 |
| YU536-D04 | | 8.39 | 95.4 | 96.9 | 4.37 | 1.45 | −0.25 |
| YU537-B08 | | 8.11 | 97.2 | 97 | 4.43 | 2.05 | −0.47 |
| YU537-H11 | | 8.11 | 96.3 | 99 | 4.64 | 1.29 | −0.19 |
| YU534-A11 | | 8.21 | 99.1 | 100 | 4.38 | 1.71 | −0.86 |
| YU534-G06 | | 8.11 | 94.5 | 95 | 3.83 | 1.52 | −0.52 |
| YU534-H02 | | 7.58 | 93.6 | 96 | 3.38 | 1.55 | 0.53 |
| YU534-F06 | | 8.01 | 93.6 | 98 | 4.3 | 2.2 | 0.07 |
| YU534-C05 | | 8.31 | 93.6 | 93 | 4.54 | 1.53 | −0.09 |
| YU534-D09 | | 8.11 | 95.4 | 99 | 3.65 | 1.58 | 0.01 |
| YU535-C06 | | 8.21 | 99.1 | 99 | 2.57 | 0.49 | −1.18 |
| YU535-A09 | | 7.88 | 100 | 95.9 | 3.27 | 0.52 | −1.7 |
| YU535-G09 | | 8 | 100 | 100 | 3.17 | 0.48 | −0.72 |
| YU536-H01 | | 8 | 100 | 99 | 3.31 | 0.76 | −0.54 |
| YU536-H05 | | 7.87 | 99.1 | 98 | 2.93 | 0.75 | −0.7 |
| YU535-G02 | | 8 | 99.1 | 91.8 | 2.98 | 0.45 | −1.05 |
| YU535-G11 | | 8 | 100 | 96.9 | 3.43 | 0.75 | −0.87 |
| YU534-B11 | | 7.88 | 98.2 | 100 | 4.25 | 0.77 | −1.27 |
| YU534-C10 | | 8 | 97.2 | 100 | 4.45 | 0.95 | −1.81 |
| YU535-D10 | | 8.11 | 98.2 | 98 | 3 | 0.77 | −1.2 |
| YU535-B02 | | 7.87 | 99.1 | 91.8 | 2.41 | 0.59 | −1.56 |
| YU534-D07 | | 8 | 100 | 99 | 3.09 | 0.6 | −2.17 |
| YU537-H08 | | 8.01 | 98.2 | 97.9 | — | — | — |
| YU534-E01 | | 7.88 | 93.6 | 93.9 | — | — | — |
| YU534-C02 | | 7.88 | 96.3 | 91 | 4.69 | 1.55 | −2.92 |
| YU534-C06 | | 7.74 | 96.3 | 93 | 4.38 | 1.02 | −1.52 |
| YU536-C12 | | 7.75 | 96.3 | 94 | 3.92 | 1.45 | −1.58 |
| YU534-G10 | | 8 | 95.4 | 98 | 3.91 | 1.46 | −1.22 |
| YU505-A01 | 102.2 | 8.11 | 100 | 98 | 3.41 | 0.5 | −0.58 |
| YU505-A02 | 43.8 | 7.75 | 99.1 | 100 | 6.02 | 3.14 | −0.63 |
| YU505-A05 | 52.7 | 8.11 | 100 | 92 | 3.84 | 1.76 | 0.09 |
| YU505-B03 | 78.9 | 8.56 | 98.2 | 93.9 | 3.13 | 0.53 | 0.82 |
| YU505-B04 | 76.6 | 8.01 | 100 | 99 | 4.22 | 0.88 | −0.32 |
| YU505-B06 | 58.5 | 8.12 | 98.2 | 100 | 4.29 | 0.62 | −1.28 |
| YU505-D01 | 89.0 | 8.39 | 100 | 97 | 3.12 | 0.35 | −1.49 |
| YU505-D02 | 49.4 | 8.12 | 100 | 99 | 4.62 | 1.16 | −0.55 |
| YU505-E01 | 24.0 | 7.88 | 93.6 | 97 | 5.18 | 1.86 | −0.85 |
| YU505-E02 | 58.8 | 8.21 | 100 | 97 | 6.46 | 3.11 | 0.24 |
| YU505-E04 | 28.0 | 7.74 | 100 | 96 | 4.57 | 1.72 | −1.22 |
| YU505-F03 | 42.2 | 8.3 | 96.3 | 96 | 3.14 | 0.48 | −1.13 |
| YU505-F04 | 79.1 | 7.74 | 100 | 92 | 4.46 | 1.37 | −1.15 |
| YU505-F05 | 26.7 | 8.31 | 93.6 | 95.9 | 4.5 | 0.44 | −0.48 |
| YU519-A01 | 74.1 | 7.88 | 98.2 | 92.9 | 5.22 | 2.65 | −1.97 |
| YU519-A09 | 35.6 | 7.88 | 97.2 | 94.8 | 4.63 | 1.17 | −2.46 |
| YU519-B05 | 128.4 | 8.21 | 100 | 99 | 5.08 | 2.71 | 0.53 |
| YU519-C01 | 140.7 | 8.48 | 98.2 | 98 | 3.9 | 1.11 | −0.57 |
| YU519-E03 | 148.9 | 8.11 | 100 | 98 | 4.23 | 1.82 | 0.63 |
| YU519-E12 | 104.1 | 8 | 100 | 94.9 | 4.84 | 2.21 | 0.08 |

### Example 9: IC₅₀-measurements in Vero E6 Cells

[0619] Screening and titration of some therapeutic monoclonal antibodies for SARS-CoV-2 neutralization in cell culture VeroE6 cells (ATCC CRL-1586) were seeded at a density of 6*10⁴/well onto cell culture 96-well plates (Nunc, Cat. #167008). Two days later, cells reached 100% confluence. For neutralization screening, antibodies (1 μg/ml final concentration) were mixed with the virus inoculum (250 pfu/well), using strain SARS-CoV-2/Münster/FI 110320/1/2020, in 100 μl full VeroE6 culture medium (DMEM, 10% FCS, 2 mM glutamine, penicillin, streptomycin) in technical quadruplicates or six fold replicates and incubated for 1 hour at 37° C.

[0620] Then, cells were overlaid with the antibody/virus mix and phase contrast images were taken automatically using a Sartorius IncuCyte S3 (10× objective, two hours image intervals, 4 images per well) housed in a HeraCell 150i incubator (37° C., 100% humidity, 5% CO2).

[0621] Image data was quantified with the IncuCyte S3 GUI tools measuring the decrease of confluence concomitant with the cytopathic effect of the virus in relation to uninfected controls and controls without antibody and analyzed with GraphPad Prism 8.

[0622] For antibody titration, serial dilutions of antibodies from 1 μg/ml to 0.3 ng/ml were incubated with 25 pfu/well for one hour at 37° C. and then added to confluent VeroE6 cells on 96-well cell culture plates for one hour in the incubator (100 μl/well).

[0623] Finally, the inoculum was removed and cells were overlaid with 100 μl MEM containing 1.5% methyl-cellulose.

[0624] Three days post infection, resulting plaques per well were counted from phase contrast images obtained with a Sartorius IncuCyte S3.

[0625] IC50 was determined by fitting a sigmoidal function (four parameter logistic growth) using GraphPad Prism 8™.

[0626] Further results are listed in FIG. 17.

### Example 10: Features of the Most Preferred Antibodies

[0627] Features of the most preferred antibodies are depicted in tables 12 to 29.

TABLE 12

| | | | | Virus Neutralization at | |
|---|---|---|---|---|---|
| | | | | 1 μg/mL | |
| | | | | IgG | scFv-Fc |
| mAb | Origin | Germline VH | Germline VL | [mean %] | [median %] |
| STE90-C11 | immune scFv | IGHV3-66*04 | IGKV1-9*01 | n.d. | 100 |
| | library | | | | |
| YU536-D04 | immune scFv | IGHV3-66*02 | IGKV1-9*01 | 99 | n.d. |
| | library | | | | |
| YU537-H11 | immune scFv | IGHV3-53*01 | IGLV1-51*01 | 93 | n.d. |
| | library | | | | |

TABLE 13

| | Virus neutralization | Virus neutralization | cell based ACE2:10 nM |
|---|---|---|---|
| | (96-well titration) | (24-well titration) | RBD inhibition (FACS) |
| mAb | TCID50 (IgG) [nM] | TCID50 (IgG) [nM] | scFv-Fc IC50[nM] |
| STE90-C11 | 0.91 | 0.56 | n.d. |
| YU536-D04 | 0.20 | 0.40 | n.d. |
| YU537-H11 | 0.27 | 0.47 | n.d. |

TABLE 14

| | | | ACE2:RBD Competition |
|---|---|---|---|
| | cell based ACE2:50 nM S1-S2 | | ELISA |
| | inhibition (FACS) | | RBD binding activity |
| | IgG | scFv-Fc | at 33 nM IgG (=5 μg/ml) |
| mAb | IC50[nM] | IC50[nM] | [%] |
| STE90-C11 | 13 | n.d. | n.d. |
| YU536-D04 | n.d. | n.d. | 6 |
| YU537-H11 | n.d. | n.d. | 10 |

TABLE 15

| | ELISA EC50 (IgG) | | ELISA EC50 (scFv-Fc) | | | |
|---|---|---|---|---|---|---|
| | RBD | S1-S2 | S1 | RBD | S1-S2 | S1 |
| mAb | [nM] | [nM] | [nM] | [nM] | [nM] | [nM] |
| STE90-C11 | 0.3 | 0.5 | 0.3 | n.d. | n.d. | n.d. |
| YU536-D04 | 1.1 | n.d. | n.d. | n.d. | n.d. | n.d. |
| YU537-H11 | 1.4 | n.d. | n.d. | n.d. | n.d. | n.d. |

TABLE 16

| | | Yield | | High MW fraction | | | | |
|---|---|---|---|---|---|---|---|---|
| | | (Expi293F) | | in SEC [%] | | | Melt. | Agg. |
| | | IgG | SDS- | | 24 h at | 24 h at | Temp | Temp |
| mAb | Epitope | [mg/L] | PAGE | normal | pH3 | 45° C. | [° C.] | [° C.] |
| STE90-C11 | n.d. | 59 | ok | 0.0 | n.d. | 0.0 | n.d. | n.d. |
| YU536-D04 | conformational | n.d. | ok | 0.0 | 1.1 | 0.0 | 69 | 81 |
| YU537-H11 | conformational | n.d. | ok | 0.0 | 0.0 | 0.0 | 71 | 72 |

TABLE 17

| | S/N | S/N | | |
|---|---|---|---|---|
| | stickiness | stickiness | S/N stickiness | S/N stickiness |
| mAb | to DNA | to LPS | to Lysozyme | to cell lysate |
| STE90-C11 | 1.0 | 1.0 | 1.0 | 0.7 |
| YU536-D04 | 0.3 | 1.2 | 0.6 | 0.3 |
| YU537-H11 | 0.3 | 1.2 | 0.7 | 0.6 |

TABLE 18

| mAb | CDR of VH | CDR of VL |
|---|---|---|
| STE90-C11 | GLTVSSNY_IYSGGST_ | QGISSY_AAS_ |
| | ARDVADAFDI | QQLNSYPPFT |
| YU536-D04 | SNYMS_VIYSGGSTYYADSVKG_ | RASQGISSYLA_ |
| | DVDLVVMGL | AASTLQS_ |
| | | QQLNSYPIT |
| YU537-H11 | SNYMS_VIYSGGSTYYADSVKG_ | SGSSSNIGNNYVS_ |
| | GESGSPYGMDV | DTNKRPS_ |
| | | ATWDSSLSVGV |

TABLE 19

| mAb | AA of VH |
|---|---|
| STE90- | QVQLVESGGGLVQPGGSLRLSCAASGLTVSSNYMSWVRQAPGK |
| C11 | GLEWVSVIYSGGSTYYADSVKGRFTISRDDSKNTLYLQMNSLR |
| | AEDTAVYYCARDVADAFDIWGQGTMVTVSS |
| YU536- | QVQLVQSGGGLVQPGGSLRLSCAASGLTVSSNYMSWVRQAPGK |
| D04 | GLEWVSVIYSGGSTYYADSVKGRFIISRDNSKNTLYLQMNSLR |
| | AEDTAVYYCARDLVVMGLDVWGKGTLVTVSS |
| YU537- | EVQLLESGGGLIQPGGSLRLSCAASGLTVSSNYMSWVRQAPGK |
| H11 | GLEWVSVIYSGGSTYYADSVKGRFTISRDNSKNALYLQMNSLR |
| | AEDTAVYYCARGESGSPYGMDVWGQGTLVTVSS |

TABLE 20

| mAb | AA of VL |
|---|---|
| STE90- | DIVMTQSPSFLSASVGDRVTITCRASQGISSYLAWYQQKPGKA |
| C11 | PKLLIYAASTLQSGVPSRFSGSGSGTEFTLTISSLQPEDFATY |
| | YCQQLNSYPPFTFGPGTKVDIK |
| YU536- | DIQLTQSPSSLSASVGDRVTITCRASQGISSYLAWYQQKPGKA |
| D04 | PKLLIYAASTLQSGVPSRFSGSGSGTDFTLTISSLQPEDFATY |
| | YCQQLNSYPITFGQGTKLEIK |
| YU537- | QSVLTQPPSVSAAPGQKVTISCSGSSSNIGNNYVSWYQQLPGT |
| H11 | APKLLIYDTNKRPSGIPDRFSGSKSGTSATLGITGLQTGDEAD |
| | YYCATWDSSLSVGVFGGGTKLTVL |

TABLE 21

| | | pI | Germinality | Germinality | Unusual |
|---|---|---|---|---|---|
| | Pairing | human | Index VH | Index VL | residues |
| mAb | abundamce | IgG | [%] | [%] | VH |
| STE90- | 0.02 | 8 | 97.2 | 98 | 0 |
| C11 | | | | | |
| YU536- | 0.02 | 8.39 | 95.4 | 96.9 | 0 |
| D04 | | | | | |
| YU537- | 0.02 | 8.11 | 96.3 | 99 | 0 |
| H11 | | | | | |

TABLE 22

| | Unusual | | Total | CDR |
|---|---|---|---|---|
| | residues | Total CDR | hydrophobicity | Hydrophobicity |
| mAb | VL | Length | score | score |
| STE90-C11 | 0 | 57 | 4.2 | 0.92 |
| YU536-D04 | 0 | 57 | 4.37 | 1.45 |
| YU537-H11 | 0 | 63 | 4.64 | 1.29 |

TABLE 23

| | | CDR | Cysteines/ | |
|---|---|---|---|---|
| | scFv | charge | Glycosylation | Other |
| mAb | charge | total | Flags | PTM flags |
| STE90- | −1.04 | −1.14 | 0 | 0 |
| C11 | | | | |
| YU536- | 1.22 | −0.25 | 0 | 1 |
| D04 | | | | |
| YU537- | 0.82 | −0.19 | 0 | 0 |
| H11 | | | | |

TABLE 24

| | | Asparagine | Aspartate | |
|---|---|---|---|---|
| | Amidation | deamidation | isomerization | Cysteine |
| mAb | site | site | site | in CDR |
| STE90-C11 | 0 | 1 | 1 | 0 |
| YU536-D04 | 0 | 1 | 1 | 0 |
| YU537-H11 | 0 | 0 | 3 | 0 |

TABLE 25

| | Fragmenta- | Integrin | Lysine | | N- |
|---|---|---|---|---|---|
| | tion | binding | glycation | Methionine | glycosyla- |
| mAb | site | site | site | in CDR | tion site |
| STE90- | 0 | 0 | 0 | 1 | 0 |
| C11 | | | | | |
| YU536- | 0 | 1 | 0 | 2 | 0 |
| D04 | | | | | |
| YU537- | 0 | 0 | 0 | 2 | 0 |
| H11 | | | | | |

TABLE 26

| mAb | N-terminal glutamate | Tryptophan in CDR |
|---|---|---|
| STE90-C11 | 0 | 0 |
| YU536-D04 | 0 | 0 |
| YU537-H11 | 1 | 1 |

TABLE 27

| | ID - | | T cell | Critical |
|---|---|---|---|---|
| | hIgG1 | | Epitope | Cys, N- |
| mAb | HS | Name | Score | Glyco |
| STE90-C11 | TPP-27099 | STE90-C11-hIgG1wt- | 354.2 | 0 |
| | | HS-kappa | | |
| YU536-D04 | TPP-27110 | YU536-D04-hIgG1wt- | 649.5 | 0 |
| | | HS-kappa | | |
| YU537-H11 | TPP-27096 | YU537-H11-hIgG1wt- | 501.8 | 0 |
| | | HS-lambda | | |

TABLE 28

| | Non-Critical | | | |
|---|---|---|---|---|
| | Asp Isomerisation, | | | |
| | Deamidation, | | Predicted | |
| | M-Oxidation | Predicted | Thermo- | Predicted |
| | (CDRs only | Solubility | stability | viscosity |
| mAb | M35 excluded) | [mg/ml] | [deg_C.] | [cP] |
| STE90-C11 | 2 | 92.186 | 73.86 | 60.239 |
| YU536-D04 | 3 | 89.391 | 76.308 | 26.142 |
| YU537-H11 | 4 | 103.588 | 75.624 | 67.315 |

TABLE 29
mAb

| | | | |
|---|---|---|---|
| STE90-C11 | Kappa, G1 | (IGKV1-9-01- | (IGHV3-66-01-D- |
| | | IGKJ3-01) | IGHJ3-01) |
| YU536-D04 | Kappa, G1 | (IGKV1-39-01- | (IGHV3-66-01-D- |
| | | IGKJ2-01) | IGHJ2-01) |
| YU537-H11 | Lambda, G1 | (IGLV1-51-01- | (IGHV3-53-01-D- |
| | | IGLJ2-01) | IGHJ1-01) |

### Example 11: Binding Studies with “Escape”-Mutations

[0628] A deeper characterization of the best neutralizer was performed in respect to cross-reaction to other coronaviruses, binding specifically to known RBD mutations, biochemical and biophysical properties was conducted. The binding of STE90-C11, YU505-A02, YU537-H11 and YU536-D04 to other coronaviruses SARS-CoV-1, MERS-CoV, HCov-HKU1, HCoV-229E and HCoV-NL63 Spike proteins was tested by titration ELISA. The antibody bound specifically SARS-CoV2 and did not show any cross reactions to other human-pathogenic coronaviruses. The antibody CR3022 (Tian et al., 2020) was used as control, because of the known cross reactivity to SARS (data not shown).

[0629] Because first SARS-CoV-2 mutants in patients are being identified and mutations within the RBD have been characterized to arise under antibody selection pressure (Baum et al., 2020; Shi et al., 2020). S1 subunits harbouring single point mutations in the RBD were produced and binding of STE90-C11, YU505-A02, YU537-H11 and YU536-D04 to those mutants was tested.

[0630] A “worst-scenario” mutant containing all the 7 single point mutations, termed 51-7PM, was producible and therefore also tested. All constructs were still functionally binding recombinant ACE2.

[0631] The published antibodies anti-SARS-CoV-2 antibody CR3022 which is cross-reactive with SARS-CoV-2, the SARS-CoV-2 antibody CB6 (Shi et al., 2020) and the antibodies REGN10933 and REGN10987 (Hansen et al., 2020) were also titrated against the same panel of 51 mutants. The cumulative results of these experiments are summarized in FIG. 30.

[0632] The antibodies STE90-C11, YU505-A02, YU537-H11 and YU536-D04 were still binding specifically to all of the investigated RBD mutations with only a slightly reduced binding specifically to the F486V mutation. Surprisingly, the antibodies still retain at least partially their binding activity to the “worst-case” 51-7PM mutant.

[0633] In contrast, CB6 showed reduced or strongly reduced binding specifically to four of the seven mutations. REGN10933 lost binding specifically to 51-7PM and showed reduced binding specifically to the F486V mutants. Binding to E484K, G485R seemed also to be at least reduced.

[0634] CR3022 showed also loss of binding specifically to the combined seven mutations and to the V367F mutation which is close to the antibody binding site and reduced binding specifically to the E484K and G485R mutation.

### Example 12: Binning Study

[0635] Epitope binning was performed in a premix setup. The antibodies were coupled in replicate (2×) on a HC30M chip using EDC/NHS chemistry:
[0636] 5 μg/mL in acetate buffer pH 4.5, final volume 250 μL
[0637] Amount of antibody needed: 1.25 μg
[0638] Immobilization time 10 min

[0639] Mixture of antibodies (1 μM) and antigen (200 nM) was prepared in running buffer (HBST), the final volume was 300 μL.
[0640] Amount of antibodies needed: 4 μg
[0641] Amount of antigen: RBD 40 μg, S1-S2 177 μg

[0642] Epitope binning setup: association 5 min, regeneration Glycine 1.5 2×40 s.

### Example 13: BLI-Measurement

[0643] In order to test the affinity of the inventive antibodies to the “escape”-mutants mentioned before, a BLI (bio-layer interferometry)-measurement was done (cf. also Abdiche et al., PLOS ONE, 1 Mar. 2014|Volume 9|Issue 3).

[0644] BLI is a label-free technology for measuring biomolecular interactions. It is an optical analytical technique that analyzes the interference pattern of white light reflected from two surfaces: a layer of immobilized protein on the biosensor tip, and an internal reference layer. Any change in the number of molecules bound to the biosensor tip causes a shift in the interference pattern that can be measured in real-time.

[0645] The binding between a ligand immobilized on the biosensor tip surface and an analyte in solution produces an increase in optical thickness at the biosensor tip, which results in a wavelength shift, Δλ, which is a direct measure of the change in thickness of the biological layer.

[0646] The affinity was measured by Bio-Layer Interferometry in three different assays using the Octet qKe (Fortebio/Sartorius GmbH, Gottingen, Germany).

[0647] In the first assay, anti-mouse Fc-Capture (AMC) sensors were activated for 10 min in PBS. After that, the sensors were equilibrated in assay buffer (PBS containing 1% BSA and 0.05% Tween 20) for 60 s before RBD-mFc (Sino Biologicals) was loaded onto the sensors at 10 μg/ml for 180 s. After a stable baseline measurement was established (60 s), antigen-loaded sensors were transferred to an 8-point antibody dilution series (500, 158, 50, 15, 5, 1.5, 0.5 and 0 nM). Association of the Fab antibody to the antigen was measured for 300 s. After that, the sensors were transferred into assay buffer were the dissociation was measured for 900 s. Significant binding of the antibody to an unloaded sensor was not detected. For data analysis, the reference measurement (0 nM) was subtracted from the other measurements and data traces ranging from 158 to 1.5 nM were used for modelling of the kinetic data using a 1:1 binding model.

[0648] In the second assay, anti-human Fab (FAB2G) sensors were activated for 10 min in PBS. After that, the sensors were equilibrated in assay buffer (PBS containing 1% BSA and 0.05% Tween 20) for 60 s before the IgG antibody was loaded onto the sensors at 2.5 μg/ml for 180 s. After a stable baseline measurement was established (60 s), antibody-loaded sensors were transferred to an 8-point S1-HIS antigen dilution series (500, 158, 50, 15, 5, 1.5, 0.5 and 0 nM). Association of the S1 antigen to the antibody was measured for 300 s. After that, the sensors were transferred into assay buffer were the dissociation was measured for 900 s. Significant binding of the antigen to an unloaded sensor was not detected. For data analysis, the reference measurement (0 nM) was subtracted from the other measurements and data traces ranging from 50 to 5 nM were used for modelling of the kinetic data using a 1:1 binding model in the Data Analysis HT 11.0 software tool.

[0649] And in the third assay, Protein A sensors were activated for 10 min in PBS. Before use, the sensors were regenerated for 5 cycles in 10 mM Glycine buffer (pH2.0) followed by neutralization in PBS. Each step was performed for 5 s. After that, the regenerated sensors were equilibrated in assay buffer (PBS containing 1% BSA and 0.05% Tween 20) for 60 s before the IgG antibody was loaded onto the sensors at 2.5 μg/ml for 180 s. After a stable baseline measurement was established (60 s), antibody-loaded sensors were transferred to an 8-point 51-HIS antigen dilution series (500, 158, 50, 15, 5, 1.5, 0.5 and 0 nM). Association of the 51 antigen to the antibody was measured for 300 s. After that, the sensors were transferred into assay buffer were the dissociation was measured for 900 s. Significant binding of the antigen to an unloaded sensor was not detected. For data analysis, the reference measurement (0 nM) was subtracted from the other measurements and data traces ranging from 50 to 0.5 nM were used for modelling of the kinetic data using a 1:1 binding model.

### Example 14: Affinity Study

[0650] STE90-C11, YU537-H11 and YU536-D04 affinities to different targets were measured by Biolayer Interferometrie (BLI) (see example 13).

[0651] The binding-affinity of Fab antibodies to “wild-type” RBD-mFc (i.e. RBD without point mutations) immobilized on an anti-Fmc capture surface was as follows:

| Antibody | K_{D} [nM] | R² |
|---|---|---|
| STE90-C11 | 8.14 | 0.9917 |
| YU537-H11 | 61.1 | 0.9703 |
| YU536-D04 | 17.5 | 0.9953 |

[0652] The binding-affinity to S1-His by immobilized Fab antibodies on a FAB2G-capture surface was as follows:

| Antibody | K_{D} [nM] | R² |
|---|---|---|
| STE90-C11 | 1.56 | 0.9969 |
| YU537-H11 | 11.7 | 0.9963 |
| YU536-D04 | 5.49 | 0.9917 |

[0653] The binding-affinity to S1-His by immobilized Fab antibodies on a Protein A-surface was as follows:

| Antibody | K_{D} [nM] | R² |
|---|---|---|
| STE90-C11 | 6.53 | 0.9891 |
| YU537-H11 | 32.5 | 0.9798 |
| YU536-D04 | 23 | 0.9964 |

### Example 15: Binding Study to RBD-Mutations

[0654] The binding of STE90-C11 (SEQ ID. No.: 1305-1312) to 51 containing RBD mutations from COVID-19 patients was analyzed, showing a binding to most mutants. As the cell based inhibition analysis demonstrate, STE90-C11 is able to inhibit most analyzed mutants, validating a tolerance for RBD mutations. REGN10933 (Hansen et al., 2020), which is also binding at the RBD-ACE2 interface, showed a loss of neutralization in an assay using pseudoviral particles for the F486V and a reduced neutralization for both G485D and E484K mutations (Baum et al., 2020). Loss of binding to F486A is also described for VH-Fc ab8 (Li et al., 2020b). In the epitope analysis, REGN10933 has more molecular interactions within the region aa483-aa486 compared to STE90-C11. Currently, the variant 6.1.1.7 is widely spread and STE90-C11 has reduced binding to N501Y and lost binding to mutants with the K417N/T mutations which occur in B.1.351 and 6.1.1.28.1 variants.

[0655] Furthermore, STE90-C11 binds strongly to the RBD mutations in the emerging SARS-CoV-2 variants B.1.429/B.1.427 (L452R), B.1.526 (E484K or S477N), B1.258Δ (N439K), B.1.525 (E484K), B.1.1.28.2 (E484K) and B.1.1.33 (E484K). These variants are emerging, e.g. the frequency of B.1.429+B.1.427 reached 40% in January 2021 (Zhang et al., 2021) or B.1.258 with 59% in the samples sequenced in Czech in the last three month of 2020 (Brejová et al., 2021). B.1.617 (L452R, E484Q) has superseeded B.1.1.7 in India and the prevalence of this variant was 100% of all sequenced viruses in mid of April 2021 (India Mutation Report. Alaa Abdel Latif, Julia L. Mullen, Manar Alkuzweny, Ginger Tsueng, Marco Cano, Emily Haag, Jerry Zhou, Mark Zeller, Nate Matteson, Chunlei Wu, Kristian G. Andersen, Andrew I. Su, Karthik Gangavarapu, Laura D. Hughes, and the Center for Viral Systems Biology. outbreak.info, (available at https://outbreak.info/location-reports?loc=IND&selected=S°/03AE484K&selected=B.1.1.7&selected=B.1.351&selected=B.1.617). Accessed 21 Apr. 2021).

[0656] Similar positive results were found for YU537-H11 (SEQ ID. No.: 389-408) and YU536-D04 (SEQ ID. No.: 349-368).

[0657] In summary, the antibodies YU537-H11 (SEQ ID. No.: 389-408), YU536-D04 (SEQ ID. No.: 349-368) and STE90-C11 (SEQ ID. No.: 1305-1312) bind to the RBD-ACE2 interface and maintain high similarity to the human germline V-genes VH3-66, the same family of many isolated anti-SARS-CoV-2 neutralizing antibodies disclosed herein. YU537-H11, YU536-D04 and STE90-C11 are tolerant to most known RBD mutants especially those of the mutants B.1.429/6.1.427, B.1.526, B1.258Δ, B.1.535, B.1.617 and B.1.1.33.

[0658] In a further binding study the antibody STE90-C11 (SEQ ID. No.: 1305-1312) was tested in its ability to bind to the “Indian mutant” (L452R+E484Q+D614G). It could be shown that STE-90-C11 bound this mutation as good as to the wildtype RBD (cf. FIG. 45).

### Example 16: Development of Conserved Antibody Sequences

[0659] From the findings above, a sequence alignment was performed with the software Clustal™ (Omega) in order to develop a concept of a conserved antibody sequence (cf. FIGS. 43 & 44).

[0660] In a first alignment the heavy and light chain sequences of STE90-C11 and YU536-D04 were compared to each other (FIG. 43). A large number of identical, conserved and/or semi-conserved residues could be identified.

[0661] In another experiment an alignment of heavy and light chains of the antibodies STE90-C11, YU536-D04 with the further related antibody YU537-H11 was made (FIG. 44). Despite a more distant relationship of the YU537-cluster with the YU536- and STE90-cluster, a large number of identical, conserved and/or semi-conserved residues could be identified.

[0662] The alignments confirmed the earlier finding that the antibodies of the present invention represent a structurally related group of antibodies, which show advantageous features when it comes to the ability to recognize SARS-CoV-2-mutants.

### Example 17: Animal Studies

### 1. Hamster Model of SARS-CoV-2 Infection

[0663] Animal procedures were performed according to the European Guidelines for Animal Studies after approval by the Institutional Animal Care Committee and the relevant state authority (Landesamt für Gesundheit and Soziales, Berlin, Permit number 0086/20).

[0664] SARS-CoV-2 isolate BetaCoV/Germany/BavPat1/2020 (Wölfe) et al., 2020) was used as challenge virus for hamster experiments. The virus was propagated and titrated on Vero E6 cells (ATCC CRL-1586) in minimal essential medium (MEM; PAN Biotech, Aidenbach, Germany) supplemented with 10% fetal bovine serum (PAN Biotech), 100 IU/ml penicillin G and 100 μg/ml streptomycin (Carl Roth, Karlsruhe, Germany) and stored at −80° C. prior to experimental infections.

[0665] Per group, nine male and female Syrian hamsters (Mesocricetus auratus) strain RjHAN:AURA (Janvier, Le Genest-Saint-Isle, France) were used. Animals were housed in GR-900 IVC cages (Tecniplast, Buguggiate, Italy) and provided with food ad libidum and bountiful enrichment and nesting materials (Carfil, Oud-Turnhout, Belgium). Hamsters were randomly distributed into experimental groups and treated intraperitoneally with 3.7 mg/kg or 37 mg/kg STE90-C11 in a total volume of 1 ml PBS, two hours post infection, the control group received 1 ml PBS only at the same time-point.

[0666] SARS-CoV-2 infection was performed as previously described (Osterrieder et al., 2020). Briefly, anaesthetized hamsters received 1×10⁵ pfu SARS-CoV-2 in 60 μL MEM intranasally two hours before treatment. Following infection, the clinical presentation of all animals was monitored twice a day, body weight of all hamsters was recorded daily. On days 3, 5 and 14 post infection, three randomly assigned hamsters per group were euthanized. Euthanasia was applied by exsanguination under general anaesthesia as described (Nakamura et al., 2017). Oropharyngeal swabs and lungs were collected for virus titrations, RT-qPCR and/or histopathological examinations. All organs were immediately frozen at −80° C. or preserved in 4% formaldehyde for subsequent in-depth histopathological investigations.

[0667] To assess virus titers from 50 mg lung tissue, tissue homogenates were prepared using a bead mill (Analytic Jena) and 10-fold serial dilutions were prepared in MEM, and plated on Vero E6 cells in 12-well-plates. The dilutions were removed after 2 h and cells were overlaid with 1.25% microcrystalline cellulose (Avicel) in MEM supplemented with 10% FBS and penicillin/streptomycin. Three days later, cells were formalin-fixed, stained with crystal violet, and plaques were counted.

[0668] STE90-C11 was tested in a Syrian hamster challenge model. In this model, hamsters were intra-nasally infected with 1×10⁵ pfu genuine SARS-CoV-2 and 2 h later treated with 3.7 mg/kg or 37 mg/kg STE90-C11 or with PBS in the control group. The virus titer in the lung of treated animals showed a dose dependent reduction of viral load on day 3 and 5 after infection. The measured mean viral load was 8.3×10 3 pfu with 37 mg/kg IgG compared to 1.5×10 6 pfu in the PBS control at day 3.

[0669] The hamster model is further characterized by a rapid weight loss in the first days after SARS-CoV-2 infection but also rapid recovery of body weight from around one week post infection on. Animals treated with the higher STE90-C11 dose showed a reduced loss of weight and a faster weight recovery compared to the PBS control.

### 2. Transgenic Mice Model of SARS-CoV-2 Infection

[0670] All animal experiments were performed in compliance with the German Animal Welfare Act (TierSchG BGBI. I S. 1206, 1313; May 18, 2006) and Directive 2010/63/EU. The mice were handled in accordance with good animal practice as defined by the Federation for Laboratory Animal Science Associations and Gesellschaft für Versuchstierkunde/Society of Laboratory Animal Science. All animal experiments were approved by the responsible state office (Lower Saxony State Office of Consumer Protection and Food Safety) under permits number 20_3567. K18hACE2 mice (B6.Cg-Tg (K18-ACE2)₂Prlmn/J) were purchased from Charles River (Sulzfeld, Germany), Mice were housed at the animal facility of the Helmholtz Centre for Infection Research under pathogen-free conditions.

[0671] Mice were fixed in a restrainer before injection and the lateral tail veins were hyperaemized. Different antibody concentrations were diluted in 100 ul of PBS and injected intravenous into the lateral tail vein.

[0672] Female and male at least 6-wk-old mice were infected with tissue culture-derived virus and housed in specific pathogen-free conditions throughout the experiment. Mice were anesthetized with Ketamin/Xylazin and inoculated intra-nasally with 2,000 PFU of virus in 20 ul of Phosphate buffered saline (PBS).

[0673] The mice were sacrificed by CO2 asphyxiation on day 5. Lungs were collected aseptically, homogenized in 500 uL PBS and stored at −80-C. Part of the organ homogenates were used for titration cells and the other part for qPCR Analysis. Organ homogenates were serially diluted 1:10-1:105 in medium (DMEM supplemented with 5% FCS, 2 mM glutamine, 100 IU/mL penicillin and 100 μg/mL streptomycin). Vero E-6 cells were then inoculated with 200 ul of diluted homogenates and incubated for 1 h, 37° C., CO2 incubator. Cells were then covered with 1.75% Carboxymethyl-cellulose and incubated at 37° C., CO2 incubator for 3-5 days. Plates were then fixed with 6% Paraformaldehyde for 1 h and then stained with 1% Crystal violet. Plaques were then read under microscope.

[0674] The antibody STE90-C11 was tested in the transgenic human ACE2 mice model. Mice were first treated with 6, 30, 60 or 120 mg/kg STE90-C11 or with PBS in the control group. After 1 h, they were inoculated intra-nasally with 1,000 or 2,000 pfu genuine SARS-CoV-2, or with PBS in the control group. The virus titer was measured with 4.7×10 4 pfu in the first experiment with 1,000 pfu and 7.4×10 5 pfu in the experiment with 2,000 pfu. Only in the two experiments, one with 60 mg/kg and one with 6 mg/kg a remaining viral load of 5.6×10 2, respectively 3.1×10 2 pfu, was detected. In all other experiments the virus was completely removed from the lungs. In the control group, a significant weight loss was measured 4 days post infection but not the groups with antibody treatment.

### Example 18: Selection Pressure Experiment

[0675] Calu-3 cells were seeded onto three 12-well plates. Antibody STE90-C11 or Palivizumab as IgG control was added in 5-fold dilutions (starting from 12 μg/ml) to the growth medium. (12, 2.4, 0.48, 0.096, etc. μg/ml). Then, SARS-CoV-2 was added (18.875 pfu/ml); CPE is monitored in the IncuCyte; CPE was visible at 3 dpi for COVEX-1 conc. 480 ng/ml and below and for Palivizumab in all concentrations.

[0676] Six days after infection, SN were taken from all antibody dilutions and those of 480 ng/ml COVEX-1 (IMP) and. Pavlivizumab (12 μg/ml) were transferred to naïve Calu-3 cells treated with the same conc. row of antibodies. 3.5 days after transfer, CPE was observed at conc. of 12 μg/ml STE90-C11. SN from these wells were inactivated following the Caliskan lab lysis protocol, transferred to cryotubes (2 replicates of each) and frozen at −80° C. for further analysis.

[0677] Within the control typical mutations occurring randomly such as K417T and N501T with little or no selection advantage. Under selection pressure with STE90-C11 the mutation N501T (in the british mutant) was not increased (=blocked by STE90-C11), whereas the mutant K417T (in the brazilian mutant) was highly enriched and could not be repressed by STE90-C11.

[0678] STE90-C11 was also binding to the “Czech”, “Nigerian”, “Mink (Danish)” and “New York” mutations.

### Example 19: Chain-Shuffling Experiment

[0679] In order to further show that the antibodies of the invention are structurally related with each other, a “chain-shuffling”-experiment was performed. That is, a hybrid-antibody comprising the heavy chain of YU536-D04 (Seq. ID No. 364) and the light chain of STE90-C11 (Seq. ID No. 1309) was produced and its binding ability to wildtype and mutant RBDs was measured (see result in FIG. 46).

[0680] In further experiments also other combinations were tested with similar results, such as depicted in table 30.

TABLE 30
Comparison of different hybrid antibodies

| | | RBD-binding | | | | |
|---|---|---|---|---|---|---|
| | | quality as | | | | wildtype |
| | | compared to | | | | virus |
| | | STE90-C11 | | | | neutralizing |
| VL | VH | wt | N501Y | K417N | BSA | activity |
| STE90-C11 | STE90-C11 | + | − | − | − | + |
| (SEQ ID No. 1309) | (SEQ ID No. 1305) | | | | | |
| YU536-D04 | STE90-C11 | + | + | + | − | + |
| (SEQ ID No. 362) | (SEQ ID No. 1305) | | | | | |
| YU536-D04 | YU537-H11 | + | + | + | − | + |
| (SEQ ID No. 362) | (SEQ ID No. 404) | | | | | |
| STE90-C11 | YU536-D04 | + | + | + | − | + |
| (SEQ ID No. 1309) | (SEQ ID No. 364) | | | | | |
| YU537-H11 | YU536-D04 | + | + | + | − | + |
| (SEQ ID No. 402) | (SEQ ID No. 364) | | | | | |
| STE90-C11 | YU537-H11 | + | + | + | − | + |
| (SEQ ID No. 1309) | (SEQ ID No. 404) | | | | | |
| YU537-H11 | STE90-C11 | + | + | + | − | + |
| (SEQ ID No. 402) | (SEQ ID No. 1305) | | | | | |
| Control Antibody (Palivizumab) | | − | − | − | − | − |

Wherein ″+″ shows similar binding as compared to STE90-C11, and ″−″ shows little or no binding.

[0681] It turns out that also the hybrid-antibodies bind to the RBD with a very similar binding ability and show neutralizing activity. In case of mutants N501Y and K417N the binding of the hybrid-antibodies was even improved as compared to STE90-C11. This shows that the different heavy and light chains of the inventive antibodies can easily be combined with each other in order to archive a sufficient binding and even improve the binding to certain mutants, if needed.

### Example 20: Comparison of Neutralization Activity of Different Antibodies

[0682] A comparison was done of some inventive antibodies with the prior art antibody COV2-2094 from Seth J. Zost et al.: “Potently neutralizing human antibodies that block SARS-CoV-2 receptor binding and protect animals”, bioRxiv, 22 May 2020. The results are depicted in table 31.

[0683] It turns out that the neutralizing activity of prior art antibody COV2-2094 is significantly less pronounced as the inventive antibodies.

TABLE 31
Results of neutralization comparison

| Antibody | Neutralization |
|---|---|
| COV2-2094 | 1.03 nM |
| STE90-C11 | 0.56 nM |
| YU536-D04 | 0.40 nM |
| YU537-H11 | 0.47 nM |

1. A humanized or a human therapeutic monoclonal antibody or antigen-binding fragment, or a substantially similar variant thereof comprising a heavy chain and a light chain;
wherein the heavy chain comprises
a heavy chain CDR1 (H-CDR1) domain with an amino acid sequence selected from the group consisting of SEQ ID NO: 1306, 910, 350, and a substitution of up to one amino acid in any one of these H-CDR1-sequences;
a heavy chain CDR2 (H-CDR2) domain with an amino acid sequence selected from the group consisting of SEQ ID NO: 1307, 912, 352, 392 and a substitution of up to one amino acid in any one of these H-CDR2-sequences;
a heavy chain CDR3 (H-CDR3) domain with an amino acid sequence selected from the group consisting of SEQ ID NO: 1308, 914, 354, 394 and a substitution of up to one amino acid in any one of these H-CDR3-sequences; and
wherein the light chain comprises
a light chain CDR1 (L-CDR1) domain with an amino acid sequence selected from the group consisting of SEQ ID NO: 1310, 916, 356, 396 and a substitution of up to one amino acid in any one of these L-CDR1-sequences;
a light chain CDR2 (L-CDR2) domain with an amino acid sequence selected from the group consisting of SEQ ID NO: 1311, 918, 358, 398 and a substitution of up to one amino acid in any one of these L-CDR2-sequences;
a light chain CDR3 (L-CDR3) domain with an amino acid sequence selected from the group consisting of SEQ ID NO: 1312, 920, 360, 400 and a substitution of up to one amino acid in any one of these L-CDR3-sequences;
wherein the monoclonal antibody or antigen-binding fragment thereof binds specifically to SARS-CoV-2 glycoprotein S with the amino acid sequence of SEQ ID NO: 02 and/or neutralizes the infectious activity of SARS-CoV-2.

2-15. (canceled)

16. The therapeutic antibody or antigen-binding fragment or a substantially similar variant thereof according to claim 1, selected from an antibody comprising:
(a) a heavy chain CDR1 (H-CDR1) domain of SEQ ID NO: 350,
a heavy chain CDR2 (H-CDR2) domain of SEQ ID NO: 352;
a heavy chain CDR3 (H-CDR3) domain of SEQ ID NO: 354,
a light chain CDR1 (L-CDR1) domain of SEQ ID NO: 356,
a light chain CDR2 (L-CDR2) domain of SEQ ID NO: 358, and
a light chain CDR3 (L-CDR3) domain of SEQ ID NO: 360, or a substitution of up to one amino acid in any one of these H-CDR- and L-CDR-sequences; or
(b) a heavy chain CDR1 (H-CDR1) domain of SEQ ID NO: 390,
a heavy chain CDR2 (H-CDR2) domain of SEQ ID NO: 392;
a heavy chain CDR3 (H-CDR3) domain of SEQ ID NO: 394,
a light chain CDR1 (L-CDR1) domain of SEQ ID NO: 396,
a light chain CDR2 (L-CDR2) domain of SEQ ID NO: 398, and
a light chain CDR3 (L-CDR3) domain of SEQ ID NO: 400, or a substitution of up to one amino acid in any one of these H-CDR- and L-CDR-sequences; or
(c) a heavy chain CDR1 (H-CDR1) domain of SEQ ID NO: 910,
a heavy chain CDR2 (H-CDR2) domain of SEQ ID NO: 912;
a heavy chain CDR3 (H-CDR3) domain of SEQ ID NO: 914,
a light chain CDR1 (L-CDR1) domain of SEQ ID NO: 916,
a light chain CDR2 (L-CDR2) domain of SEQ ID NO: 918, and
a light chain CDR3 (L-CDR3) domain of SEQ ID NO: 920, or a substitution of up to one amino acid in any one of these H-CDR- or L-CDR-sequences; or
(d) a heavy chain CDR1 (H-CDR1) domain of SEQ ID NO: 1306,
a heavy chain CDR2 (H-CDR2) domain of SEQ ID NO: 1307;
a heavy chain CDR3 (H-CDR3) domain of SEQ ID NO: 1308,
a light chain CDR1 (L-CDR1) domain of SEQ ID NO: 1310,
a light chain CDR2 (L-CDR2) domain of SEQ ID NO: 1311, and
a light chain CDR3 (L-CDR3) domain of SEQ ID NO: 1312, or a substitution of up to one amino acid in any one of these H-CDR- or L-CDR-sequences.

17. The therapeutic antibody or antigen-binding fragment or a substantially similar variant thereof according to claim 1, wherein the neutralization of the infectious activity of SARS-CoV-2 results in a confluence score of at least 95% as measured with an infectious SARS-CoV-2 VERO E6 neutralizing assay.

18. The therapeutic antibody or antigen-binding fragment or a substantially similar variant thereof according to claim 1, wherein the antibody or antigen-binding fragment binds specifically to an epitope within the receptor binding domain (RBD) of a S1 domain of SARS-CoV-2 glycoprotein (SEQ ID NO: 06) and binds specifically to at least one escape-mutation of the S1 domain of SARS-CoV-2 glycoprotein selected from the list consisting of S1-V367F, S1-N439K, S1-G476S, S1-V483A, S1-E484K, S1-G485R, S1-F486V, S1-7PM-mutant (SEQ ID NO: 1730), and any combination thereof.

19. The therapeutic antibody or antigen-binding fragment or a substantially similar variant thereof according to claim 1, wherein said antibody or antigen-binding fragment thereof binds specifically both to an epitope comprising amino acids 400-FVIRGDEVRQIAPQTGKIADDYN-422 (SEQ ID NO. 1826) within the RBD (SEQ ID NO: 06) and to the S1-7PM-mutant (SEQ ID NO: 1730).

20. The therapeutic antibody or antigen-binding fragment or a substantially similar variant thereof according to claim 1, wherein said antibody or antigen-binding fragment thereof competes for binding to an epitope within the RBD (SEQ ID NO: 06) with an antibody comprising a heavy chain variable region of the amino acid sequence in SEQ ID NO: 1305; and a light chain variable region of the amino acid sequence in SEQ ID NO: 1309 or with an antibody comprising a heavy chain variable region of the amino acid sequence in SEQ ID NO: 364 and a light chain variable region of the amino acid sequence in SEQ ID NO: 362; and wherein the contamination ratio is less than 0.2.

21. The therapeutic antibody or antigen-binding fragment or a substantially similar variant thereof according to claim 1, wherein said antibody or antigen-binding fragment thereof competes for binding to epitope 165-AKRVNCYFPLQSYGFQ-180 within the S1-7PM-mutant (SEQ ID NO: 1730) with an antibody comprising (i) a heavy chain variable region of the amino acid sequence in SEQ ID NO: 1305 and a light chain variable region of the amino acid sequence in SEQ ID NO: 1309; or (ii) a heavy chain variable region of the amino acid sequence in SEQ ID NO: 364 and a light chain variable region of the amino acid sequence in SEQ ID NO: 362.

22. The therapeutic antibody or antigen-binding fragment or a substantially similar variant thereof according to claim 1, selected from the group of antibodies comprising
(i) a heavy chain variable region of the amino acid sequence in SEQ ID NO: 1305 and a light chain variable region of the amino acid sequence in SEQ ID NO: 1309;
(ii) a heavy chain variable region of the amino acid sequence in SEQ ID NO: 926 and a light chain variable region of the amino acid sequence in SEQ ID NO: 928; or
(iii) a heavy chain variable region of the amino acid sequence in SEQ ID NO: 364 and a light chain variable region of the amino acid sequence in SEQ ID NO: 362.

23. The therapeutic antibody or antigen-binding fragment or a substantially similar variant thereof according to claim 1, comprising a heavy chain variable region of the amino acid sequence in SEQ ID NO: 1305 and a light chain variable region of the amino acid sequence in SEQ ID NO: 1309.

24. The therapeutic antibody or antigen-binding fragment or a substantially similar variant thereof according to claim 1, characterized by one or more of the following:
(i) having a specific binding specifically to the RBD of SARS-CoV-2 glycoprotein S with an affinity (K_{D}) of 6.5×10⁻⁸ M or less,
(ii) having a heavy-chain constant region comprising at least one of the mutations selected from the group consisting of E233P, L234V, L235A, ΔG236, D265G, A327Q, and A330S; and any combination thereof,
(iii) having a specific binding specifically to a S1-7PM-mutant (SEQ ID NO: 1730) with a K_{D} of 10×10⁻⁹ M or less,
(iv) having an IC₅₀ of less than 0.036 μg/ml (240 pM), preferably of 0.026 μg/ml or less (173 pM), or
(v) having a neutralization activity of 1 nM or less;
(vi) having an interspersed domain (heavy chain framework region 2) between the heavy chain CDR1 (H-CDR1) domain and the heavy chain CDR2 (H-CDR2) domain comprising the amino acid sequence motif of Trp-Val-Arg-Gln-Ala-Pro-Gly-Lys-Gly-Leu-Glu-Trp-Val-Ser;
(vii) having an interspersed domain (light chain framework region 2) between the light chain CDR1 (L-CDR1) domain and the light chain CDR2 (L-CDR2) domain comprising the amino acid sequence motif of Trp-Tyr-Gln-Gln-Leu-Pro-Gly-Thr-Ala-Pro-Lys-Leu-Leu-Ile-Tyr;
(viii) having a light chain CDR1 (L-CDR1) domain comprising the amino acid sequence motif of Gln-Gly-Ile-Ser-Ser-Tyr (SEQ ID NO: 1310),
(ix) having a light chain CDR2 (L-CDR2) domain comprising the amino acid sequence motif Ala-Ala-Ser (SEQ ID NO: 1311); or
(x) having a heavy chain CDR2 (H-CDR2) domain comprising the amino acid sequence motif Ile-Tyr-Ser-Gly-Gly-Ser-Thr (SEQ ID NO: 1307).

25. The therapeutic antibody or antigen-binding fragment or a substantially similar variant thereof according to claim 1, wherein the constant region of said antibody comprises at least one of the mutations selected from the group consisting of E233P, L234V

26. An isolated nucleic acid molecule encoding the therapeutic antibody or antigen-binding fragment or a substantially similar variant thereof according to claim 1.

27. An expression vector comprising the nucleic acid molecule according to claim 26.

28. A method of producing the therapeutic antibody or antigen-binding fragment or a substantially similar variant thereof comprising the steps of introducing the expression vector according to claim 27 into an isolated host cell, growing the cell under conditions permitting production of the antibody or antigen-binding fragment thereof or a substantially similar variant thereof encoded by the isolated nucleic acid, and recovering the antibody or fragment so produced.

29. A pharmaceutical composition comprising the therapeutic antibody or antigen-binding fragment or a substantially similar variant thereof according to claim 1, and a pharmaceutically acceptable carrier.

30. A method of treating a patient having a SARS CoV-2 infection or related condition comprising administering the therapeutic antibody or antigen-binding fragment of claim 1 to the patient.

31. The method according to claim 30, wherein the therapeutic antibody or antigen-binding fragment of claim 1 is characterized by one or more of the following:
capable of reducing an antibody-dependent enhancement (ADE) reaction, hyperinflammation, cytokine storm syndrome (CSS) and/or complement activation in the patient, when administered to the patient with SARS-CoV-2 infection;
capable of preventing, reducing or healing a SARS-CoV-2 infection when administered to the patient in need thereof,
capable of reducing the load of viral particles in the sputum of the patient by at least 50% for at least 48 hours after administration of the therapeutic antibody or antigen-binding fragment thereof.

32. The method according to claim 30, wherein the patient having the SARS CoV-2 infection or related condition has an elevated risk,
wherein the elevated risk is selected from an age group above 60 years, diabetes, asthma, obesity, cardiovascular diseases, COPD, immune-deficiency, and/or cancer; and any combination thereof.

33. The method according to claim 30, wherein the patient is suspected to develop or has already developed a multisystem inflammatory syndrome (MIS-C).

34. The method according to claim 30, in order to prevent and/or reduce any conditions associated with COVID-19 selected from at least one member of the group consisting of fever, cough, fatigue, shortness of breath, loss of smell and taste, pleurisy, pericarditis, lung consolidation, pulmonary edema, pneumonia, serous exudation, fibrin exudation, pulmonary edema, pneumocyte hyperplasia, large atypical pneumocytes, interstitial inflammation with lymphocytic infiltration and multinucleated giant cell formation, diffuse alveolar damage (DAD), diffuse alveolar exudates, acute respiratory distress syndrome (ARDS), severe hypoxemia, exudates in alveolar cavities and pulmonary interstitial fibrosis plasmacytosis in bronchoalveolar lavage (BAL), disseminated intravascular coagulation (DIC), leukoerythroblastic reaction, and/or microvesicular steatosis in the liver; and any combination thereof.

35. The method according to claim 30, wherein the patient is additionally treated with at least one member selected of the group of a monoclonal antibody, a steroid, a virostatic, a protease inhibitor, an anti-malarial and an antibiotic, and any combination thereof.

36. The method according to claim 35, wherein the at least one member is the monoclonal antibody is tocilizumab; the steroid dexamethasone, hydrocortisone, methylprednisolone, or prednisolone; the virostatic is remdesivir; the protease inhibitor is lopinavir; the anti-malarial is hydroxychloroquine; or any combination thereof.

The application's sequence listing, which the Patent Office published only in electronic form, follows.

SEQUENCE LISTING (1844 sequences)

SEQ ID NO: 1 - DNA, 3822 bp, SARS-CoV-2
atgtttgtttttcttgttttattgccactagtctctagtcagtgtgttaatcttacaaccagaactcaattaccccctgcatacactaattctttcacacgtggtgtttattaccctgacaaagttttcagatcctcagttttacattcaactcaggacttgttcttacctttcttttccaatgttacttggttccatgctatacatgtctctgggaccaatggtactaagaggtttgataaccctgtcctaccatttaatgatggtgtttattttgcttccactgagaagtctaacataataagaggctggatttttggtactactttagattcgaagacccagtccctacttattgttaataacgctactaatgttgttattaaagtctgtgaatttcaattttgtaatgatccatttttgggtgtttattaccacaaaaacaacaaaagttggatggaaagtgagttcagagtttattctagtgcgaataattgcacttttgaatatgtctctcagccttttcttatggaccttgaaggaaaacagggtaatttcaaaaatcttagggaatttgtgtttaagaatattgatggttattttaaaatatattctaagcacacgcctattaatttagtgcgtgatctccctcagggtttttcggctttagaaccattggtagatttgccaataggtattaacatcactaggtttcaaactttacttgctttacatagaagttatttgactcctggtgattcttcttcaggttggacagctggtgctgcagcttattatgtgggttatcttcaacctaggacttttctattaaaatataatgaaaatggaaccattacagatgctgtagactgtgcacttgaccctctctcagaaacaaagtgtacgttgaaatccttcactgtagaaaaaggaatctatcaaacttctaactttagagtccaaccaacagaatctattgttagatttcctaatattacaaacttgtgcccttttggtgaagtttttaacgccaccagatttgcatctgtttatgcttggaacaggaagagaatcagcaactgtgttgctgattattctgtcctatataattccgcatcattttccacttttaagtgttatggagtgtctcctactaaattaaatgatctctgctttactaatgtctatgcagattcatttgtaattagaggtgatgaagtcagacaaatcgctccagggcaaactggaaagattgctgattataattataaattaccagatgattttacaggctgcgttatagcttggaattctaacaatcttgattctaaggttggtggtaattataattacctgtatagattgtttaggaagtctaatctcaaaccttttgagagagatatttcaactgaaatctatcaggccggtagcacaccttgtaatggtgttgaaggttttaattgttactttcctttacaatcatatggtttccaacccactaatggtgttggttaccaaccatacagagtagtagtactttcttttgaacttctacatgcaccagcaactgtttgtggacctaaaaagtctactaatttggttaaaaacaaatgtgtcaatttcaacttcaatggtttaacaggcacaggtgttcttactgagtctaacaaaaagtttctgcctttccaacaatttggcagagacattgctgacactactgatgctgtccgtgatccacagacacttgagattcttgacattacaccatgttcttttggtggtgtcagtgttataacaccaggaacaaatacttctaaccaggttgctgttctttatcaggatgttaactgcacagaagtccctgttgctattcatgcagatcaacttactcctacttggcgtgtttattctacaggttctaatgtttttcaaacacgtgcaggctgtttaataggggctgaacatgtcaacaactcatatgagtgtgacatacccattggtgcaggtatatgcgctagttatcagactcagactaattctcctcggcgggcacgtagtgtagctagtcaatccatcattgcctacactatgtcacttggtgcagaaaattcagttgcttactctaataactctattgccatacccacaaattttactattagtgttaccacagaaattctaccagtgtctatgaccaagacatcagtagattgtacaatgtacatttgtggtgattcaactgaatgcagcaatcttttgttgcaatatggcagtttttgtacacaattaaaccgtgctttaactggaatagctgttgaacaagacaaaaacacccaagaagtttttgcacaagtcaaacaaatttacaaaacaccaccaattaaagattttggtggttttaatttttcacaaatattaccagatccatcaaaaccaagcaagaggtcatttattgaagatctacttttcaacaaagtgacacttgcagatgctggcttcatcaaacaatatggtgattgccttggtgatattgctgctagagacctcatttgtgcacaaaagtttaacggccttactgttttgccacctttgctcacagatgaaatgattgctcaatacacttctgcactgttagcgggtacaatcacttctggttggacctttggtgcaggtgctgcattacaaataccatttgctatgcaaatggcttataggtttaatggtattggagttacacagaatgttctctatgagaaccaaaaattgattgccaaccaatttaatagtgctattggcaaaattcaagactcactttcttccacagcaagtgcacttggaaaacttcaagatgtggtcaaccaaaatgcacaagctttaaacacgcttgttaaacaacttagctccaattttggtgcaatttcaagtgttttaaatgatatcctttcacgtcttgacaaagttgaggctgaagtgcaaattgataggttgatcacaggcagacttcaaagtttgcagacatatgtgactcaacaattaattagagctgcagaaatcagagcttctgctaatcttgctgctactaaaatgtcagagtgtgtacttggacaatcaaaaagagttgatttttgtggaaagggctatcatcttatgtccttccctcagtcagcacctcatggtgtagtcttcttgcatgtgacttatgtccctgcacaagaaaagaacttcacaactgctcctgccatttgtcatgatggaaaagcacactttcctcgtgaaggtgtctttgtttcaaatggcacacactggtttgtaacacaaaggaatttttatgaaccacaaatcattactacagacaacacatttgtgtctggtaactgtgatgttgtaataggaattgtcaacaacacagtttatgatcctttgcaacctgaattagactcattcaaggaggagttagataaatattttaagaatcatacatcaccagatgttgatttaggtgacatctctggcattaatgcttcagttgtaaacattcaaaaagaaattgaccgcctcaatgaggttgccaagaatttaaatgaatctctcatcgatctccaagaacttggaaagtatgagcagtatataaaatggccatggtacatttggctaggttttatagctggcttgattgccatagtaatggtgacaattatgctttgctgtatgaccagttgctgtagttgtctcaagggctgttgttcttgtggatcctgctgcaaatttgatgaagacgactctgagccagtgctcaaaggagtcaaattacattacacataa

SEQ ID NO: 2 - protein, 1273 aa, SARS-CoV-2
MFVFLVLLPLVSSQCVNLTTRTQLPPAYTNSFTRGVYYPDKVFRSSVLHSTQDLFLPFFSNVTWFHAIHVSGTNGTKRFDNPVLPFNDGVYFASTEKSNIIRGWIFGTTLDSKTQSLLIVNNATNVVIKVCEFQFCNDPFLGVYYHKNNKSWMESEFRVYSSANNCTFEYVSQPFLMDLEGKQGNFKNLREFVFKNIDGYFKIYSKHTPINLVRDLPQGFSALEPLVDLPIGINITRFQTLLALHRSYLTPGDSSSGWTAGAAAYYVGYLQPRTFLLKYNENGTITDAVDCALDPLSETKCTLKSFTVEKGIYQTSNFRVQPTESIVRFPNITNLCPFGEVFNATRFASVYAWNRKRISNCVADYSVLYNSASFSTFKCYGVSPTKLNDLCFTNVYADSFVIRGDEVRQIAPGQTGKIADYNYKLPDDFTGCVIAWNSNNLDSKVGGNYNYLYRLFRKSNLKPFERDISTEIYQAGSTPCNGVEGFNCYFPLQSYGFQPTNGVGYQPYRVVVLSFELLHAPATVCGPKKSTNLVKNKCVNFNFNGLTGTGVLTESNKKFLPFQQFGRDIADTTDAVRDPQTLEILDITPCSFGGVSVITPGTNTSNQVAVLYQDVNCTEVPVAIHADQLTPTWRVYSTGSNVFQTRAGCLIGAEHVNNSYECDIPIGAGICASYQTQTNSPRRARSVASQSIIAYTMSLGAENSVAYSNNSIAIPTNFTISVTTEILPVSMTKTSVDCTMYICGDSTECSNLLLQYGSFCTQLNRALTGIAVEQDKNTQEVFAQVKQIYKTPPIKDFGGFNFSQILPDPSKPSKRSFIEDLLFNKVTLADAGFIKQYGDCLGDIAARDLICAQKFNGLTVLPPLLTDEMIAQYTSALLAGTITSGWTFGAGAALQIPFAMQMAYRFNGIGVTQNVLYENQKLIANQFNSAIGKIQDSLSSTASALGKLQDVVNQNAQALNTLVKQLSSNFGAISSVLNDILSRLDKVEAEVQIDRLITGRLQSLQTYVTQQLIRAAEIRASANLAATKMSECVLGQSKRVDFCGKGYHLMSFPQSAPHGVVFLHVTYVPAQEKNFTTAPAICHDGKAHFPREGVFVSNGTHWFVTQRNFYEPQIITTDNTFVSGNCDVVIGIVNNTVYDPLQPELDSFKEELDKYFKNHTSPDVDLGDISGINASVVNIQKEIDRLNEVAKNLNESLIDLQELGKYEQYIKWPWYIWLGFIAGLIAIVMVTIMLCCMTSCCSCLKGCCSCGSCCKFDEDDSEPVLKGVKLHYT

SEQ ID NO: 3 - DNA, 2010 bp, SARS-CoV-2
gttaatcttacaaccagaactcaattaccccctgcatacactaattctttcacacgtggtgtttattaccctgacaaagttttcagatcctcagttttacattcaactcaggacttgttcttacctttcttttccaatgttacttggttccatgctatacatgtctctgggaccaatggtactaagaggtttgataaccctgtcctaccatttaatgatggtgtttattttgcttccactgagaagtctaacataataagaggctggatttttggtactactttagattcgaagacccagtccctacttattgttaataacgctactaatgttgttattaaagtctgtgaatttcaattttgtaatgatccatttttgggtgtttattaccacaaaaacaacaaaagttggatggaaagtgagttcagagtttattctagtgcgaataattgcacttttgaatatgtctctcagccttttcttatggaccttgaaggaaaacagggtaatttcaaaaatcttagggaatttgtgtttaagaatattgatggttattttaaaatatattctaagcacacgcctattaatttagtgcgtgatctccctcagggtttttcggctttagaaccattggtagatttgccaataggtattaacatcactaggtttcaaactttacttgctttacatagaagttatttgactcctggtgattcttcttcaggttggacagctggtgctgcagcttattatgtgggttatcttcaacctaggacttttctattaaaatataatgaaaatggaaccattacagatgctgtagactgtgcacttgaccctctctcagaaacaaagtgtacgttgaaatccttcactgtagaaaaaggaatctatcaaacttctaactttagagtccaaccaacagaatctattgttagatttcctaatattacaaacttgtgcccttttggtgaagtttttaacgccaccagatttgcatctgtttatgcttggaacaggaagagaatcagcaactgtgttgctgattattctgtcctatataattccgcatcattttccacttttaagtgttatggagtgtctcctactaaattaaatgatctctgctttactaatgtctatgcagattcatttgtaattagaggtgatgaagtcagacaaatcgctccagggcaaactggaaagattgctgattataattataaattaccagatgattttacaggctgcgttatagcttggaattctaacaatcttgattctaaggttggtggtaattataattacctgtatagattgtttaggaagtctaatctcaaaccttttgagagagatatttcaactgaaatctatcaggccggtagcacaccttgtaatggtgttgaaggttttaattgttactttcctttacaatcatatggtttccaacccactaatggtgttggttaccaaccatacagagtagtagtactttcttttgaacttctacatgcaccagcaactgtttgtggacctaaaaagtctactaatttggttaaaaacaaatgtgtcaatttcaacttcaatggtttaacaggcacaggtgttcttactgagtctaacaaaaagtttctgcctttccaacaatttggcagagacattgctgacactactgatgctgtccgtgatccacagacacttgagattcttgacattacaccatgttcttttggtggtgtcagtgttataacaccaggaacaaatacttctaaccaggttgctgttctttatcaggatgttaactgcacagaagtccctgttgctattcatgcagatcaacttactcctacttggcgtgtttattctacaggttctaatgtttttcaaacacgtgcaggctgtttaataggggctgaacatgtcaacaactcatatgagtgtgacatacccattggtgcaggtatatgcgctagttatcagactcagactaattctcctcggcgggcacgt

SEQ ID NO: 4 - protein, 670 aa, SARS-CoV-2
VNLTTRTQLPPAYTNSFTRGVYYPDKVFRSSVLHSTQDLFLPFFSNVTWFHAIHVSGTNGTKRFDNPVLPFNDGVYFASTEKSNIIRGWIFGTTLDSKTQSLLIVNNATNVVIKVCEFQFCNDPFLGVYYHKNNKSWMESEFRVYSSANNCTFEYVSQPFLMDLEGKQGNFKNLREFVFKNIDGYFKIYSKHTPINLVRDLPQGFSALEPLVDLPIGINITRFQTLLALHRSYLTPGDSSSGWTAGAAAYYVGYLQPRTFLLKYNENGTITDAVDCALDPLSETKCTLKSFTVEKGIYQTSNFRVQPTESIVRFPNITNLCPFGEVFNATRFASVYAWNRKRISNCVADYSVLYNSASFSTFKCYGVSPTKLNDLCFTNVYADSFVIRGDEVRQIAPGQTGKIADYNYKLPDDFTGCVIAWNSNNLDSKVGGNYNYLYRLFRKSNLKPFERDISTEIYQAGSTPCNGVEGFNCYFPLQSYGFQPTNGVGYQPYRVVVLSFELLHAPATVCGPKKSTNLVKNKCVNFNFNGLTGTGVLTESNKKFLPFQQFGRDIADTTDAVRDPQTLEILDITPCSFGGVSVITPGTNTSNQVAVLYQDVNCTEVPVAIHADQLTPTWRVYSTGSNVFQTRAGCLIGAEHVNNSYECDIPIGAGICASYQTQTNSPRRAR

SEQ ID NO: 5 - DNA, 669 bp, SARS-CoV-2
agagtccaaccaacagaatctattgttagatttcctaatattacaaacttgtgcccttttggtgaagtttttaacgccaccagatttgcatctgtttatgcttggaacaggaagagaatcagcaactgtgttgctgattattctgtcctatataattccgcatcattttccacttttaagtgttatggagtgtctcctactaaattaaatgatctctgctttactaatgtctatgcagattcatttgtaattagaggtgatgaagtcagacaaatcgctccagggcaaactggaaagattgctgattataattataaattaccagatgattttacaggctgcgttatagcttggaattctaacaatcttgattctaaggttggtggtaattataattacctgtatagattgtttaggaagtctaatctcaaaccttttgagagagatatttcaactgaaatctatcaggccggtagcacaccttgtaatggtgttgaaggttttaattgttactttcctttacaatcatatggtttccaacccactaatggtgttggttaccaaccatacagagtagtagtactttcttttgaacttctacatgcaccagcaactgtttgtggacctaaaaagtctactaatttggttaaaaacaaatgtgtcaatttc

SEQ ID NO: 6 - protein, 223 aa, SARS-CoV-2
RVQPTESIVRFPNITNLCPFGEVFNATRFASVYAWNRKRISNCVADYSVLYNSASFSTFKCYGVSPTKLNDLCFTNVYADSFVIRGDEVRQIAPGQTGKIADYNYKLPDDFTGCVIAWNSNNLDSKVGGNYNYLYRLFRKSNLKPFERDISTEIYQAGSTPCNGVEGFNCYFPLQSYGFQPTNGVGYQPYRVVVLSFELLHAPATVCGPKKSTNLVKNKCVNF

SEQ ID NO: 7 - DNA, 2418 bp, Homo sapiens
atgtcaagctcttcctggctccttctcagccttgttgctgtaactgctgctcagtccaccattgaggaacaggccaagacatttttggacaagtttaaccacgaagccgaagacctgttctatcaaagttcacttgcttcttggaattataacaccaatattactgaagagaatgtccaaaacatgaataatgctggggacaaatggtctgcctttttaaaggaacagtccacacttgcccaaatgtatccactacaagaaattcagaatctcacagtcaagcttcagctgcaggctcttcagcaaaatgggtcttcagtgctctcagaagacaagagcaaacggttgaacacaattctaaatacaatgagcaccatctacagtactggaaaagtttgtaacccagataatccacaagaatgcttattacttgaaccaggtttgaatgaaataatggcaaacagtttagactacaatgagaggctctgggcttgggaaagctggagatctgaggtcggcaagcagctgaggccattatatgaagagtatgtggtcttgaaaaatgagatggcaagagcaaatcattatgaggactatggggattattggagaggagactatgaagtaaatggggtagatggctatgactacagccgcggccagttgattgaagatgtggaacatacctttgaagagattaaaccattatatgaacatcttcatgcctatgtgagggcaaagttgatgaatgcctatccttcctatatcagtccaattggatgcctccctgctcatttgcttggtgatatgtggggtagattttggacaaatctgtactctttgacagttccctttggacagaaaccaaacatagatgttactgatgcaatggtggaccaggcctgggatgcacagagaatattcaaggaggccgagaagttctttgtatctgttggtcttcctaatatgactcaaggattctgggaaaattccatgctaacggacccaggaaatgttcagaaagcagtctgccatcccacagcttgggacctggggaagggcgacttcaggatccttatgtgcacaaaggtgacaatggacgacttcctgacagctcatcatgagatggggcatatccagtatgatatggcatatgctgcacaaccttttctgctaagaaatggagctaatgaaggattccatgaagctgttggggaaatcatgtcactttctgcagccacacctaagcatttaaaatccattggtcttctgtcacccgattttcaagaagacaatgaaacagaaataaacttcctgctcaaacaagcactcacgattgttgggactctgccatttacttacatgttagagaagtggaggtggatggtctttaaaggggaaattcccaaagaccagtggatgaaaaagtggtgggagatgaagcgagagatagttggggtggtggaacctgtgccccatgatgaaacatactgtgaccccgcatctctgttccatgtttctaatgattactcattcattcgatattacacaaggaccctttaccaattccagtttcaagaagcactttgtcaagcagctaaacatgaaggccctctgcacaaatgtgacatctcaaactctacagaagctggacagaaactgttcaatatgctgaggcttggaaaatcagaaccctggaccctagcattggaaaatgttgtaggagcaaagaacatgaatgtaaggccactgctcaactactttgagcccttatttacctggctgaaagaccagaacaagaattcttttgtgggatggagtaccgactggagtccatatgcagaccaaagcatcaaagtgaggataagcctaaaatcagctcttggagataaagcatatgaatggaacgacaatgaaatgtacctgttccgatcatctgttgcatatgctatgaggcagtactttttaaaagtaaaaaatcagatgattctttttggggaggaggatgtgcgagtggctaatttgaaaccaagaatctcctttaatttctttgtcactgcacctaaaaatgtgtctgatatcattcctagaactgaagttgaaaaggccatcaggatgtcccggagccgtatcaatgatgctttccgtctgaatgacaacagcctagagtttctggggatacagccaacacttggacctcctaaccagccccctgtttccatatggctgattgtttttggagttgtgatgggagtgatagtggttggcattgtcatcctgatcttcactgggatcagagatcggaagaagaaaaataaagcaagaagtggagaaaatccttatgcctccatcgatattagcaaaggagaaaataatccaggattccaaaacactgatgatgttcagacctccttttag

SEQ ID NO: 8 - protein, 805 aa, Homo sapiens [sequence omitted]

SEQ ID NO: 9 - DNA, 15 bp, Artificial Sequence
  YU535-C09 HCDR1 DNA
gacgcctggatgacc

SEQ ID NO: 10 - protein, 5 aa, Artificial Sequence
  YU535-C09 HCDR1 PRT
DAWMT

SEQ ID NO: 11 - DNA, 57 bp, Artificial Sequence
  YU535-C09 HCDR2 DNA
cgtattaacagcaacacggatcatgggacaacagactacgctgcacccgtgaaaggc

SEQ ID NO: 12 - protein, 19 aa, Artificial Sequence
  YU535-C09 HCDR2 PRT
RINSNTDHGTTDYAAPVKG

SEQ ID NO: 13 - DNA, 33 bp, Artificial Sequence
  YU535-C09 HCDR3 DNA
tcgtattacgattattggagtgctttcctgtac

SEQ ID NO: 14 - protein, 11 aa, Artificial Sequence
  YU535-C09 HCDR3 PRT
SYYDYWSAFLY

SEQ ID NO: 15 - DNA, 33 bp, Artificial Sequence
  YU535-C09 LCDR1 DNA
cgggcaagtcagagcattagcagctatttaaat

SEQ ID NO: 16 - protein, 11 aa, Artificial Sequence
  YU535-C09 LCDR1 PRT
RASQSISSYLN

SEQ ID NO: 17 - DNA, 21 bp, Artificial Sequence
  YU535-C09 LCDR2 DNA
gctgcatccagtttgcaaagt

SEQ ID NO: 18 - protein, 7 aa, Artificial Sequence
  YU535-C09 LCDR2 PRT
AASSLQS

SEQ ID NO: 19 - DNA, 27 bp, Artificial Sequence
  YU535-C09 LCDR3 DNA
caacaggcttacaatatcccgtacact

SEQ ID NO: 20 - protein, 9 aa, Artificial Sequence
  YU535-C09 LCDR3 PRT
QQAYNIPYT

SEQ ID NO: 21 - DNA, 321 bp, Artificial Sequence
  YU535-C09 VL DNA
gacatccagttgacccagtctccatcctccctgtctgcatctgtaggagacagaatcaccatcacttgccgggcaagtcagagcattagcagctatttaaattggtatcagcagaaaccagggaaagcccctaagctcctgatctatgctgcatccagtttgcaaagtggggtcccatcaaggttcagtggcagtggatctgggacagatttcactctcaccatcagcagtctgcaacctgaagattttggaacttactactgccaacaggcttacaatatcccgtacacttttggccaggggaccaaggtggaaatcaaa

SEQ ID NO: 22 - protein, 107 aa, Artificial Sequence
  YU535-C09 VL PRT
DIQLTQSPSSLSASVGDRITITCRASQSISSYLNWYQQKPGKAPKLLIYAASSLQSGVPSRFSGSGSGTDFTLTISSLQPEDFGTYYCQQAYNIPYTFGQGTKVEIK

SEQ ID NO: 23 - DNA, 366 bp, Artificial Sequence
  YU535-C09 VH DNA
gaggtgcagctggtgcagtctgggggaggcttggtaaagcctggggggtcccttagactctcctgtgcagcctctggattccctttcagtgacgcctggatgacctgggtccgccaggctccagggaaggggctggagtgggttggccgtattaacagcaacacggatcatgggacaacagactacgctgcacccgtgaaaggcagattcaccatctcaagagatgattcaaaaaacacactgtatctgcaaatgaatagcctgaaaaccgaggacacaggcgtttattactgtaccttctcgtattacgattattggagtgctttcctgtactggggtcagggcaccctggtcaccgtgtcctca

SEQ ID NO: 24 - protein, 122 aa, Artificial Sequence
  YU535-C09 VH PRT
EVQLVQSGGGLVKPGGSLRLSCAASGFPFSDAWMTWVRQAPGKGLEWVGRINSNTDHGTTDYAAPVKGRFTISRDDSKNTLYLQMNSLKTEDTGVYYCTFSYYDYWSAFLYWGQGTLVTVSS

SEQ ID NO: 25 - DNA, 1350 bp, Artificial Sequence
  YU535-C09 VH complete DNA
gaggtgcagctggtgcagtctgggggaggcttggtaaagcctggggggtcccttagactctcctgtgcagcctctggattccctttcagtgacgcctggatgacctgggtccgccaggctccagggaaggggctggagtgggttggccgtattaacagcaacacggatcatgggacaacagactacgctgcacccgtgaaaggcagattcaccatctcaagagatgattcaaaaaacacactgtatctgcaaatgaatagcctgaaaaccgaggacacaggcgtttattactgtaccttctcgtattacgattattggagtgctttcctgtactggggtcagggcaccctggtcaccgtgtcctcagctagcaccaagggcccatcggtcttccccctggcaccctcctccaagagcacctctgggggcacagcggccctgggctgcctggtcaaggactacttccccgaaccggtgacggtgtcgtggaactcaggcgccctgaccagcggcgtgcacaccttcccggctgtcctacagtcctcaggactctactccctcagcagcgtggtgaccgtgccctccagcagcttgggcacccagacctacatctgcaacgtgaatcacaagcccagcaacaccaaggtggacaagaaagttgagcccaaatcttgtgacaaaactcacacatgcccaccgtgcccagcacctccagtggccggaccgtcagtcttcctcttccccccaaaacccaaggacaccctcatgatctcccggacccctgaggtcacatgcgtggtggtgggcgtgagccacgaagaccctgaggtcaagttcaactggtacgtggacggcgtggaggtgcataatgccaagacaaagccgcgggaggagcagtacaacagcacgtaccgggtggtcagcgtcctcaccgtcctgcaccaggactggctgaatggcaaggagtacaagtgcaaggtctccaacaaacagctcccatcccccatcgagaaaaccatctccaaagccaaagggcagccccgagaaccacaggtgtacaccctgcccccatcccgggatgagctgaccaagaaccaggtcagcctgacctgcctggtcaaaggcttctatcccagcgacatcgccgtggagtgggagagcaatgggcagccggagaacaactacaagaccacgcctcccgtgctggactccgacggctccttcttcctctacagcaagctcaccgtggacaagagcaggtggcagcaggggaacgtcttctcatgctccgtgatgcatgaggctctgcacaaccactacacgcagaaaagcctctccctgtccccgggt

SEQ ID NO: 26 - protein, 450 aa, Artificial Sequence
  YU535-C09 VH complete PRT
EVQLVQSGGGLVKPGGSLRLSCAASGFPFSDAWMTWVRQAPGKGLEWVGRINSNTDHGTTDYAAPVKGRFTISRDDSKNTLYLQMNSLKTEDTGVYYCTFSYYDYWSAFLYWGQGTLVTVSSASTKGPSVFPLAPSSKSTSGGTAALGCLVKDYFPEPVTVSWNSGALTSGVHTFPAVLQSSGLYSLSSVVTVPSSSLGTQTYICNVNHKPSNTKVDKKVEPKSCDKTHTCPPCPAPPVAGPSVFLFPPKPKDTLMISRTPEVTCVVVGVSHEDPEVKFNWYVDGVEVHNAKTKPREEQYNSTYRVVSVLTVLHQDWLNGKEYKCKVSNKQLPSPIEKTISKAKGQPREPQVYTLPPSRDELTKNQVSLTCLVKGFYPSDIAVEWESNGQPENNYKTTPPVLDSDGSFFLYSKLTVDKSRWQQGNVFSCSVMHEALHNHYTQKSLSLSPG

SEQ ID NO: 27 - DNA, 642 bp, Artificial Sequence
  YU535-C09 VL complete DNA
gacatccagttgacccagtctccatcctccctgtctgcatctgtaggagacagaatcaccatcacttgccgggcaagtcagagcattagcagctatttaaattggtatcagcagaaaccagggaaagcccctaagctcctgatctatgctgcatccagtttgcaaagtggggtcccatcaaggttcagtggcagtggatctgggacagatttcactctcaccatcagcagtctgcaacctgaagattttggaacttactactgccaacaggcttacaatatcccgtacacttttggccaggggaccaaggtggaaatcaaacgtacggtggctgcaccatctgtgttcatcttcccgccatctgatgagcagttgaaatctggaactgcctctgttgtgtgcctgctgaataacttctatcccagagaggccaaagtacagtggaaggtggataacgccctccaatcgggtaactcccaggagagtgtcacagagcaggacagcaaggacagcacctacagcctcagcagcaccctgacgctgagcaaagcagactacgagaaacacaaagtctacgcctgcgaagtcacccatcagggcctgagctcgcccgtcacaaagagcttcaacaggggagagtgt

SEQ ID NO: 28 - protein, 214 aa, Artificial Sequence
  YU535-C09 VL complete PRT
DIQLTQSPSSLSASVGDRITITCRASQSISSYLNWYQQKPGKAPKLLIYAASSLQSGVPSRFSGSGSGTDFTLTISSLQPEDFGTYYCQQAYNIPYTFGQGTKVEIKRTVAAPSVFIFPPSDEQLKSGTASVVCLLNNFYPREAKVQWKVDNALQSGNSQESVTEQDSKDSTYSLSSTLTLSKADYEKHKVYACEVTHQGLSSPVTKSFNRGEC

SEQ ID NO: 29 - DNA, 15 bp, Artificial Sequence
  YU537-B05 HCDR1 DNA
ggctactatatgcac

SEQ ID NO: 30 - protein, 5 aa, Artificial Sequence
  YU537-B05 HCDR1 PRT
GYYMH

SEQ ID NO: 31 - DNA, 51 bp, Artificial Sequence
  YU537-B05 HCDR2 DNA
tggatcaaccctatcagtggtggcacaaactatgcacagaagtttcaaggc

SEQ ID NO: 32 - protein, 16 aa, Artificial Sequence
  YU537-B05 HCDR2 PRT
WINPISGGTNYAQKFQ

SEQ ID NO: 33 - DNA, 42 bp, Artificial Sequence
  YU537-B05 HCDR3 DNA
gtaccgtattactatgatagtagtggtctctggttcgacccc

SEQ ID NO: 34 - protein, 14 aa, Artificial Sequence
  YU537-B05 HCDR3 PRT
VPYYYDSSGLWFDP

SEQ ID NO: 35 - DNA, 42 bp, Artificial Sequence
  YU537-B05 LCDR1 DNA
actggaaccagcagtgacgttggtggttataactatgtctcc

SEQ ID NO: 36 - protein, 14 aa, Artificial Sequence
  YU537-B05 LCDR1 PRT
TGTSSDVGGYNYVS

SEQ ID NO: 37 - DNA, 21 bp, Artificial Sequence
  YU537-B05 LCDR2 DNA
gaggtcagtaatcggccctca

SEQ ID NO: 38 - protein, 7 aa, Artificial Sequence
  YU537-B05 LCDR2 PRT
EVSNRPS

SEQ ID NO: 39 - DNA, 30 bp, Artificial Sequence
  YU537-B05 LCDR3 DNA
agctcatatacaagcagcagcacttgggtg

SEQ ID NO: 40 - protein, 10 aa, Artificial Sequence
  YU537-B05 LCDR3 PRT
SSYTSSSTWV

SEQ ID NO: 41 - DNA, 330 bp, Artificial Sequence
  YU537-B05 VL DNA
cagtctgccctgactcagcctgcctccgtgtctgggtctcctggacagtcgatcaccatctcctgcactggaaccagcagtgacgttggtggttataactatgtctcctggtaccaacagcacccaggcaaagcccccaaactcatgatttatgaggtcagtaatcggccctcaggggtttctaatcgcttctctggctccaagtctggcaacacggcctccctgaccatctctgggctccaggctgaggacgaggctgattattactgcagctcatatacaagcagcagcacttgggtgttcggcggagggaccaagctgaccgtccta

SEQ ID NO: 42 - protein, 110 aa, Artificial Sequence
  YU537-B05 VL PRT
QSALTQPASVSGSPGQSITISCTGTSSDVGGYNYVSWYQQHPGKAPKLMIYEVSNRPSGVSNRFSGSKSGNTASLTISGLQAEDEADYYCSSYTSSSTWVFGGGTKLTVL

SEQ ID NO: 43 - DNA, 369 bp, Artificial Sequence
  YU537-B05 VH DNA
caggttcagctggtgcagtctggggctgaggtgaagaagcctggggcctcagtgaaggtctcctgcaaggcttctggatacaccttcaccggctactatatgcactgggtgcgacaggcccctggacaagggcttgagtggatgggatggatcaaccctatcagtggtggcacaaactatgcacagaagtttcaaggcagggtcaccatgaccagggacacgtccatcagcacagcctacatggagctgagcaggctgagatctgacgacacggccgtgtattactgtgcgagagtaccgtattactatgatagtagtggtctctggttcgacccctggggccagggaaccctggtcaccgtgtcctca

SEQ ID NO: 44 - protein, 123 aa, Artificial Sequence
  YU537-B05 VH PRT
QVQLVQSGAEVKKPGASVKVSCKASGYTFTGYYMHWVRQAPGQGLEWMGWINPISGGTNYAQKFQGRVTMTRDTSISTAYMELSRLRSDDTAVYYCARVPYYYDSSGLWFDPWGQGTLVTVSS

SEQ ID NO: 45 - DNA, 1353 bp, Artificial Sequence
  YU537-B05 VH complete DNA
caggttcagctggtgcagtctggggctgaggtgaagaagcctggggcctcagtgaaggtctcctgcaaggcttctggatacaccttcaccggctactatatgcactgggtgcgacaggcccctggacaagggcttgagtggatgggatggatcaaccctatcagtggtggcacaaactatgcacagaagtttcaaggcagggtcaccatgaccagggacacgtccatcagcacagcctacatggagctgagcaggctgagatctgacgacacggccgtgtattactgtgcgagagtaccgtattactatgatagtagtggtctctggttcgacccctggggccagggaaccctggtcaccgtgtcctcagctagcaccaagggcccatcggtcttccccctggcaccctcctccaagagcacctctgggggcacagcggccctgggctgcctggtcaaggactacttccccgaaccggtgacggtgtcgtggaactcaggcgccctgaccagcggcgtgcacaccttcccggctgtcctacagtcctcaggactctactccctcagcagcgtggtgaccgtgccctccagcagcttgggcacccagacctacatctgcaacgtgaatcacaagcccagcaacaccaaggtggacaagaaagttgagcccaaatcttgtgacaaaactcacacatgcccaccgtgcccagcacctccagtggccggaccgtcagtcttcctcttccccccaaaacccaaggacaccctcatgatctcccggacccctgaggtcacatgcgtggtggtgggcgtgagccacgaagaccctgaggtcaagttcaactggtacgtggacggcgtggaggtgcataatgccaagacaaagccgcgggaggagcagtacaacagcacgtaccgggtggtcagcgtcctcaccgtcctgcaccaggactggctgaatggcaaggagtacaagtgcaaggtctccaacaaacagctcccatcccccatcgagaaaaccatctccaaagccaaagggcagccccgagaaccacaggtgtacaccctgcccccatcccgggatgagctgaccaagaaccaggtcagcctgacctgcctggtcaaaggcttctatcccagcgacatcgccgtggagtgggagagcaatgggcagccggagaacaactacaagaccacgcctcccgtgctggactccgacggctccttcttcctctacagcaagctcaccgtggacaagagcaggtggcagcaggggaacgtcttctcatgctccgtgatgcatgaggctctgcacaaccactacacgcagaaaagcctctccctgtccccgggt

SEQ ID NO: 46 - protein, 451 aa, Artificial Sequence
  YU537-B05 VH complete PRT
QVQLVQSGAEVKKPGASVKVSCKASGYTFTGYYMHWVRQAPGQGLEWMGWINPISGGTNYAQKFQGRVTMTRDTSISTAYMELSRLRSDDTAVYYCARVPYYYDSSGLWFDPWGQGTLVTVSSASTKGPSVFPLAPSSKSTSGGTAALGCLVKDYFPEPVTVSWNSGALTSGVHTFPAVLQSSGLYSLSSVVTVPSSSLGTQTYICNVNHKPSNTKVDKKVEPKSCDKTHTCPPCPAPPVAGPSVFLFPPKPKDTLMISRTPEVTCVVVGVSHEDPEVKFNWYVDGVEVHNAKTKPREEQYNSTYRVVSVLTVLHQDWLNGKEYKCKVSNKQLPSPIEKTISKAKGQPREPQVYTLPPSRDELTKNQVSLTCLVKGFYPSDIAVEWESNGQPENNYKTTPPVLDSDGSFFLYSKLTVDKSRWQQGNVFSCSVMHEALHNHYTQKSLSLSPG

SEQ ID NO: 47 - DNA, 648 bp, Artificial Sequence
  YU537-B05 VL complete DNA
cagtctgccctgactcagcctgcctccgtgtctgggtctcctggacagtcgatcaccatctcctgcactggaaccagcagtgacgttggtggttataactatgtctcctggtaccaacagcacccaggcaaagcccccaaactcatgatttatgaggtcagtaatcggccctcaggggtttctaatcgcttctctggctccaagtctggcaacacggcctccctgaccatctctgggctccaggctgaggacgaggctgattattactgcagctcatatacaagcagcagcacttgggtgttcggcggagggaccaagctgaccgtcctaggtcagcccaaggctgcaccaagtgtcactctgttcccgccctcctctgaggagcttcaagccaacaaggccacactggtgtgtctcataagtgacttctacccgggagccgtgacagtggcctggaaggcagatagcagccccgtcaaggcgggagtggagaccaccacaccctccaaacaaagcaacaacaagtacgcggccagcagctatctgagcctgacgcctgagcagtggaagtcccacagaagctacagctgccaggtcacgcatgaagggagcaccgtggagaagacagtggcccctacagaatgttca

SEQ ID NO: 48 - protein, 216 aa, Artificial Sequence
  YU537-B05 VL complete PRT
QSALTQPASVSGSPGQSITISCTGTSSDVGGYNYVSWYQQHPGKAPKLMIYEVSNRPSGVSNRFSGSKSGNTASLTISGLQAEDEADYYCSSYTSSSTWVFGGGTKLTVLGQPKAAPSVTLFPPSSEELQANKATLVCLISDFYPGAVTVAWKADSSPVKAGVETTTPSKQSNNKYAASSYLSLTPEQWKSHRSYSCQVTHEGSTVEKTVAPTECS

SEQ ID NO: 49 - DNA, 15 bp, Artificial Sequence
  YU534-H01 HCDR1 DNA
ggctactatatgcac

SEQ ID NO: 50 - protein, 5 aa, Artificial Sequence
  YU534-H01 HCDR1 PRT
GYYMH

SEQ ID NO: 51 - DNA, 51 bp, Artificial Sequence
  YU534-H01 HCDR2 DNA
tggatcaaccctaacagtggtggcacaaactatgcacagaagtttcagggc

SEQ ID NO: 52 - protein, 16 aa, Artificial Sequence
  YU534-H01 HCDR2 PRT
WINPNSGGTNYAQKFQ

SEQ ID NO: 53 - DNA, 42 bp, Artificial Sequence
  YU534-H01 HCDR3 DNA
gcccccatgtattactatgatagtagtggttactttgactac

SEQ ID NO: 54 - protein, 14 aa, Artificial Sequence
  YU534-H01 HCDR3 PRT
APMYYYDSSGYFDY

SEQ ID NO: 55 - DNA, 42 bp, Artificial Sequence; identical to SEQ ID NO: 35
  YU534-H01 LCDR1 DNA

SEQ ID NO: 56 - protein, 14 aa, Artificial Sequence
  YU534-H01 LCDR1 PRT
TGTSSDVGGYNYVS

SEQ ID NO: 57 - DNA, 21 bp, Artificial Sequence
  YU534-H01 LCDR2 DNA
gaggtcagtaatcggccctca

SEQ ID NO: 58 - protein, 7 aa, Artificial Sequence
  YU534-H01 LCDR2 PRT
EVSNRPS

SEQ ID NO: 59 - DNA, 30 bp, Artificial Sequence
  YU534-H01 LCDR3 DNA
agctcatatacaagcagcagcacttatgtc

SEQ ID NO: 60 - protein, 10 aa, Artificial Sequence
  YU534-H01 LCDR3 PRT
SSYTSSSTYV

SEQ ID NO: 61 - DNA, 330 bp, Artificial Sequence
  YU534-H01 VL DNA
cagtctgccctgactcagcctgcctccgtgtctgggtctcctggacagtcgatcaccatctcctgcactggaaccagcagtgacgttggtggttataactatgtctcctggtaccaacaacacccaggcaaagcccccaaactcatgatttatgaggtcagtaatcggccctcaggggtttctaatcgcttctctggctccaagtctggcaacacggcctccctgacaatctctgggctccaggctgaggatgaggctgattattactgcagctcatatacaagcagcagcacttatgtcttcggaactgggaccaagctgaccgtccta

SEQ ID NO: 62 - protein, 110 aa, Artificial Sequence
  YU534-H01 VL PRT
QSALTQPASVSGSPGQSITISCTGTSSDVGGYNYVSWYQQHPGKAPKLMIYEVSNRPSGVSNRFSGSKSGNTASLTISGLQAEDEADYYCSSYTSSSTYVFGTGTKLTVL

SEQ ID NO: 63 - DNA, 369 bp, Artificial Sequence
  YU534-H01 VH DNA
gaggtgcagctggtgcagtctggggctgaggtgaagaagcctggggcctcagtgaaggtctcctgcaaggcttctggatacaccttcaccggctactatatgcactgggtgcgacaggcccctggacaagggcttgagtggatgggatggatcaaccctaacagtggtggcacaaactatgcacagaagtttcagggcagggtcaccatgaccagggacacgtccatcagcacagcctacatggagctgagcaggctgagatctgacgacacggccgtgtattactgtgcgagagcccccatgtattactatgatagtagtggttactttgactactggggccagggaaccctggtcaccgtgtcctca

SEQ ID NO: 64 - protein, 123 aa, Artificial Sequence
  YU534-H01 VH PRT
EVQLVQSGAEVKKPGASVKVSCKASGYTFTGYYMHWVRQAPGQGLEWMGWINPNSGGTNYAQKFQGRVTMTRDTSISTAYMELSRLRSDDTAVYYCARAPMYYYDSSGYFDYWGQGTLVTVSS

SEQ ID NO: 65 - DNA, 1353 bp, Artificial Sequence
  YU534-H01 VH complete DNA
gaggtgcagctggtgcagtctggggctgaggtgaagaagcctggggcctcagtgaaggtctcctgcaaggcttctggatacaccttcaccggctactatatgcactgggtgcgacaggcccctggacaagggcttgagtggatgggatggatcaaccctaacagtggtggcacaaactatgcacagaagtttcagggcagggtcaccatgaccagggacacgtccatcagcacagcctacatggagctgagcaggctgagatctgacgacacggccgtgtattactgtgcgagagcccccatgtattactatgatagtagtggttactttgactactggggccagggaaccctggtcaccgtgtcctcagctagcaccaagggcccatcggtcttccccctggcaccctcctccaagagcacctctgggggcacagcggccctgggctgcctggtcaaggactacttccccgaaccggtgacggtgtcgtggaactcaggcgccctgaccagcggcgtgcacaccttcccggctgtcctacagtcctcaggactctactccctcagcagcgtggtgaccgtgccctccagcagcttgggcacccagacctacatctgcaacgtgaatcacaagcccagcaacaccaaggtggacaagaaagttgagcccaaatcttgtgacaaaactcacacatgcccaccgtgcccagcacctccagtggccggaccgtcagtcttcctcttccccccaaaacccaaggacaccctcatgatctcccggacccctgaggtcacatgcgtggtggtgggcgtgagccacgaagaccctgaggtcaagttcaactggtacgtggacggcgtggaggtgcataatgccaagacaaagccgcgggaggagcagtacaacagcacgtaccgggtggtcagcgtcctcaccgtcctgcaccaggactggctgaatggcaaggagtacaagtgcaaggtctccaacaaacagctcccatcccccatcgagaaaaccatctccaaagccaaagggcagccccgagaaccacaggtgtacaccctgcccccatcccgggatgagctgaccaagaaccaggtcagcctgacctgcctggtcaaaggcttctatcccagcgacatcgccgtggagtgggagagcaatgggcagccggagaacaactacaagaccacgcctcccgtgctggactccgacggctccttcttcctctacagcaagctcaccgtggacaagagcaggtggcagcaggggaacgtcttctcatgctccgtgatgcatgaggctctgcacaaccactacacgcagaaaagcctctccctgtccccgggt

SEQ ID NO: 66 - protein, 451 aa, Artificial Sequence
  YU534-H01 VH complete PRT
EVQLVQSGAEVKKPGASVKVSCKASGYTFTGYYMHWVRQAPGQGLEWMGWINPNSGGTNYAQKFQGRVTMTRDTSISTAYMELSRLRSDDTAVYYCARAPMYYYDSSGYFDYWGQGTLVTVSSASTKGPSVFPLAPSSKSTSGGTAALGCLVKDYFPEPVTVSWNSGALTSGVHTFPAVLQSSGLYSLSSVVTVPSSSLGTQTYICNVNHKPSNTKVDKKVEPKSCDKTHTCPPCPAPPVAGPSVFLFPPKPKDTLMISRTPEVTCVVVGVSHEDPEVKFNWYVDGVEVHNAKTKPREEQYNSTYRVVSVLTVLHQDWLNGKEYKCKVSNKQLPSPIEKTISKAKGQPREPQVYTLPPSRDELTKNQVSLTCLVKGFYPSDIAVEWESNGQPENNYKTTPPVLDSDGSFFLYSKLTVDKSRWQQGNVFSCSVMHEALHNHYTQKSLSLSPG

SEQ ID NO: 67 - DNA, 648 bp, Artificial Sequence
  YU534-H01 VL complete DNA
cagtctgccctgactcagcctgcctccgtgtctgggtctcctggacagtcgatcaccatctcctgcactggaaccagcagtgacgttggtggttataactatgtctcctggtaccaacaacacccaggcaaagcccccaaactcatgatttatgaggtcagtaatcggccctcaggggtttctaatcgcttctctggctccaagtctggcaacacggcctccctgacaatctctgggctccaggctgaggatgaggctgattattactgcagctcatatacaagcagcagcacttatgtcttcggaactgggaccaagctgaccgtcctaggtcagcccaaggctgcaccaagtgtcactctgttcccgccctcctctgaggagcttcaagccaacaaggccacactggtgtgtctcataagtgacttctacccgggagccgtgacagtggcctggaaggcagatagcagccccgtcaaggcgggagtggagaccaccacaccctccaaacaaagcaacaacaagtacgcggccagcagctatctgagcctgacgcctgagcagtggaagtcccacagaagctacagctgccaggtcacgcatgaagggagcaccgtggagaagacagtggcccctacagaatgttca

SEQ ID NO: 68 - protein, 216 aa, Artificial Sequence
  YU534-H01 VL complete PRT
QSALTQPASVSGSPGQSITISCTGTSSDVGGYNYVSWYQQHPGKAPKLMIYEVSNRPSGVSNRFSGSKSGNTASLTISGLQAEDEADYYCSSYTSSSTYVFGTGTKLTVLGQPKAAPSVTLFPPSSEELQANKATLVCLISDFYPGAVTVAWKADSSPVKAGVETTTPSKQSNNKYAASSYLSLTPEQWKSHRSYSCQVTHEGSTVEKTVAPTECS

SEQ ID NO: 69 - DNA, 15 bp, Artificial Sequence
  YU534-F11 HCDR1 DNA
ggctactatatgcac

SEQ ID NO: 70 - protein, 5 aa, Artificial Sequence
  YU534-F11 HCDR1 PRT
GYYMH

SEQ ID NO: 71 - DNA, 51 bp, Artificial Sequence; identical to SEQ ID NO: 51
  YU534-F11 HCDR2 DNA

SEQ ID NO: 72 - protein, 16 aa, Artificial Sequence
  YU534-F11 HCDR2 PRT
WINPNSGGTNYAQKFQ

SEQ ID NO: 73 - DNA, 54 bp, Artificial Sequence
  YU534-F11 HCDR3 DNA
ggaccccaattaaatatgattacgtttgggggagttggctatgcttttgatatc

SEQ ID NO: 74 - protein, 18 aa, Artificial Sequence
  YU534-F11 HCDR3 PRT
GPQLNMITFGGVGYAFDI

SEQ ID NO: 75 - DNA, 42 bp, Artificial Sequence; identical to SEQ ID NO: 35
  YU534-F11 LCDR1 DNA

SEQ ID NO: 76 - protein, 14 aa, Artificial Sequence
  YU534-F11 LCDR1 PRT
TGTSSDVGGYNYVS

SEQ ID NO: 77 - DNA, 21 bp, Artificial Sequence
  YU534-F11 LCDR2 DNA
gatgtcagtaatcggccctca

SEQ ID NO: 78 - protein, 7 aa, Artificial Sequence
  YU534-F11 LCDR2 PRT
DVSNRPS

SEQ ID NO: 79 - DNA, 30 bp, Artificial Sequence
  YU534-F11 LCDR3 DNA
agctcatatacaagcagcagcactgtggta

SEQ ID NO: 80 - protein, 10 aa, Artificial Sequence
  YU534-F11 LCDR3 PRT
SSYTSSSTVV

SEQ ID NO: 81 - DNA, 330 bp, Artificial Sequence
  YU534-F11 VL DNA
cagtctgccctgactcagcctgcctccgcgtctgggtctcctggacagtcgatcaccatctcctgcactggaaccagcagtgacgttggtggttataactatgtctcctggtaccaacaacacccaggcaaagcccccaaactcatgatttatgatgtcagtaatcggccctcaggggtttctaatcgcttctctggctccaagtctggcaacacggcctccctgaccatctctgggctccaggctgaggacgaggctgattattactgcagctcatatacaagcagcagcactgtggtattcggcggagggaccaaggtcaccgtccta

SEQ ID NO: 82 - protein, 110 aa, Artificial Sequence
  YU534-F11 VL PRT
QSALTQPASASGSPGQSITISCTGTSSDVGGYNYVSWYQQHPGKAPKLMIYDVSNRPSGVSNRFSGSKSGNTASLTISGLQAEDEADYYCSSYTSSSTVVFGGGTKVTVL

SEQ ID NO: 83 - DNA, 381 bp, Artificial Sequence
  YU534-F11 VH DNA
gaggtgcagctggtggagtctggggctgaggtgaagaagcctggggcctcagtgaaggtctcctgcaaggcttctggatacaccttcaccggctactatatgcactgggtgcgacaggcccctggacaagggcttgagtggatgggatggatcaaccctaacagtggtggcacaaactatgcacagaagtttcagggctgggtcaccatgaccagggacacgtccatcagcacagcctacatggagctgagcaggctgagatctgacgacacggccgtgtattactgtattgttggaccccaattaaatatgattacgtttgggggagttggctatgcttttgatatctggggccaagggacaatggtcaccgtgtcttca

SEQ ID NO: 84 - protein, 127 aa, Artificial Sequence
  YU534-F11 VH PRT
EVQLVESGAEVKKPGASVKVSCKASGYTFTGYYMHWVRQAPGQGLEWMGWINPNSGGTNYAQKFQGWVTMTRDTSISTAYMELSRLRSDDTAVYYCIVGPQLNMITFGGVGYAFDIWGQGTMVTVSS

SEQ ID NO: 85 - DNA, 1365 bp, Artificial Sequence
  YU534-F11 VH complete DNA
gaggtgcagctggtggagtctggggctgaggtgaagaagcctggggcctcagtgaaggtctcctgcaaggcttctggatacaccttcaccggctactatatgcactgggtgcgacaggcccctggacaagggcttgagtggatgggatggatcaaccctaacagtggtggcacaaactatgcacagaagtttcagggctgggtcaccatgaccagggacacgtccatcagcacagcctacatggagctgagcaggctgagatctgacgacacggccgtgtattactgtattgttggaccccaattaaatatgattacgtttgggggagttggctatgcttttgatatctggggccaagggacaatggtcaccgtgtcttcagctagcaccaagggcccatcggtcttccccctggcaccctcctccaagagcacctctgggggcacagcggccctgggctgcctggtcaaggactacttccccgaaccggtgacggtgtcgtggaactcaggcgccctgaccagcggcgtgcacaccttcccggctgtcctacagtcctcaggactctactccctcagcagcgtggtgaccgtgccctccagcagcttgggcacccagacctacatctgcaacgtgaatcacaagcccagcaacaccaaggtggacaagaaagttgagcccaaatcttgtgacaaaactcacacatgcccaccgtgcccagcacctccagtggccggaccgtcagtcttcctcttccccccaaaacccaaggacaccctcatgatctcccggacccctgaggtcacatgcgtggtggtgggcgtgagccacgaagaccctgaggtcaagttcaactggtacgtggacggcgtggaggtgcataatgccaagacaaagccgcgggaggagcagtacaacagcacgtaccgggtggtcagcgtcctcaccgtcctgcaccaggactggctgaatggcaaggagtacaagtgcaaggtctccaacaaacagctcccatcccccatcgagaaaaccatctccaaagccaaagggcagccccgagaaccacaggtgtacaccctgcccccatcccgggatgagctgaccaagaaccaggtcagcctgacctgcctggtcaaaggcttctatcccagcgacatcgccgtggagtgggagagcaatgggcagccggagaacaactacaagaccacgcctcccgtgctggactccgacggctccttcttcctctacagcaagctcaccgtggacaagagcaggtggcagcaggggaacgtcttctcatgctccgtgatgcatgaggctctgcacaaccactacacgcagaaaagcctctccctgtccccgggt

SEQ ID NO: 86 - protein, 455 aa, Artificial Sequence
  YU534-F11 VH complete PRT
EVQLVESGAEVKKPGASVKVSCKASGYTFTGYYMHWVRQAPGQGLEWMGWINPNSGGTNYAQKFQGWVTMTRDTSISTAYMELSRLRSDDTAVYYCIVGPQLNMITFGGVGYAFDIWGQGTMVTVSSASTKGPSVFPLAPSSKSTSGGTAALGCLVKDYFPEPVTVSWNSGALTSGVHTFPAVLQSSGLYSLSSVVTVPSSSLGTQTYICNVNHKPSNTKVDKKVEPKSCDKTHTCPPCPAPPVAGPSVFLFPPKPKDTLMISRTPEVTCVVVGVSHEDPEVKFNWYVDGVEVHNAKTKPREEQYNSTYRVVSVLTVLHQDWLNGKEYKCKVSNKQLPSPIEKTISKAKGQPREPQVYTLPPSRDELTKNQVSLTCLVKGFYPSDIAVEWESNGQPENNYKTTPPVLDSDGSFFLYSKLTVDKSRWQQGNVFSCSVMHEALHNHYTQKSLSLSPG

SEQ ID NO: 87 - DNA, 648 bp, Artificial Sequence
  YU534-F11 VL complete DNA
cagtctgccctgactcagcctgcctccgcgtctgggtctcctggacagtcgatcaccatctcctgcactggaaccagcagtgacgttggtggttataactatgtctcctggtaccaacaacacccaggcaaagcccccaaactcatgatttatgatgtcagtaatcggccctcaggggtttctaatcgcttctctggctccaagtctggcaacacggcctccctgaccatctctgggctccaggctgaggacgaggctgattattactgcagctcatatacaagcagcagcactgtggtattcggcggagggaccaaggtcaccgtcctaggtcagcccaaggctgcaccaagtgtcactctgttcccgccctcctctgaggagcttcaagccaacaaggccacactggtgtgtctcataagtgacttctacccgggagccgtgacagtggcctggaaggcagatagcagccccgtcaaggcgggagtggagaccaccacaccctccaaacaaagcaacaacaagtacgcggccagcagctatctgagcctgacgcctgagcagtggaagtcccacagaagctacagctgccaggtcacgcatgaagggagcaccgtggagaagacagtggcccctacagaatgttca

SEQ ID NO: 88 - protein, 216 aa, Artificial Sequence
  YU534-F11 VL complete PRT
QSALTQPASASGSPGQSITISCTGTSSDVGGYNYVSWYQQHPGKAPKLMIYDVSNRPSGVSNRFSGSKSGNTASLTISGLQAEDEADYYCSSYTSSSTVVFGGGTKVTVLGQPKAAPSVTLFPPSSEELQANKATLVCLISDFYPGAVTVAWKADSSPVKAGVETTTPSKQSNNKYAASSYLSLTPEQWKSHRSYSCQVTHEGSTVEKTVAPTECS

SEQ ID NO: 89 - DNA, 15 bp, Artificial Sequence
  YU536-C01 HCDR1 DNA
aactatgccatgagc

SEQ ID NO: 90 - protein, 5 aa, Artificial Sequence
  YU536-C01 HCDR1 PRT
NYAMS

SEQ ID NO: 91 - DNA, 51 bp, Artificial Sequence
  YU536-C01 HCDR2 DNA
gcttttagtggtagtggtggtagcacatactacgcagactccgtgaagggc

SEQ ID NO: 92 - protein, 16 aa, Artificial Sequence
  YU536-C01 HCDR2 PRT
AFSGSGGSTYYADSVK

SEQ ID NO: 93 - DNA, 33 bp, Artificial Sequence
  YU536-C01 HCDR3 DNA
ggggcccggggtggctacgattacggggactac

SEQ ID NO: 94 - protein, 11 aa, Artificial Sequence
  YU536-C01 HCDR3 PRT
GARGGYDYGDY

SEQ ID NO: 95 - DNA, 33 bp, Artificial Sequence
  YU536-C01 LCDR1 DNA
cgggccagtcagagtattagtagctggttggcc

SEQ ID NO: 96 - protein, 11 aa, Artificial Sequence
  YU536-C01 LCDR1 PRT
RASQSISSWLA

SEQ ID NO: 97 - DNA, 21 bp, Artificial Sequence
  YU536-C01 LCDR2 DNA
gatgcctccagtttggaaagt

SEQ ID NO: 98 - protein, 7 aa, Artificial Sequence
  YU536-C01 LCDR2 PRT
DASSLES

SEQ ID NO: 99 - DNA, 27 bp, Artificial Sequence
  YU536-C01 LCDR3 DNA
caacagtataatagttattctcccacg

SEQ ID NO: 100 - protein, 9 aa, Artificial Sequence
  YU536-C01 LCDR3 PRT
QQYNSYSPT

SEQ ID NO: 101 - DNA, 321 bp, Artificial Sequence
  YU536-C01 VL DNA
gacatccagatgacccagtctccttccaccctgtctgcatctgtaggagacagagtcaccatcacttgccgggccagtcagagtattagtagctggttggcctggtatcagcagaaaccagggaaagcccctaagctcctgatctatgatgcctccagtttggaaagtggggttcgatcaaggttcagcggcagtggatctgggacagaattcactctcaccatcagcagcctgcagcctgatgattttgcaacttattactgccaacagtataatagttattctcccacgttcggccaagggaccaagctggagatcaaa

SEQ ID NO: 102 - protein, 107 aa, Artificial Sequence
  YU536-C01 VL PRT
DIQMTQSPSTLSASVGDRVTITCRASQSISSWLAWYQQKPGKAPKLLIYDASSLESGVRSRFSGSGSGTEFTLTISSLQPDDFATYYCQQYNSYSPTFGQGTKLEIK

SEQ ID NO: 103 - DNA, 360 bp, Artificial Sequence
  YU536-C01 VH DNA
gaggtgcagctgttggagtctgggggaggcttggtacagcctggggggtccctgagactctcctgtgcagcctctggattcacctttagcaactatgccatgagctgggtccgccaggctccagggaaggggctggagtgggtctcagcttttagtggtagtggtggtagcacatactacgcagactccgtgaagggccggttcaccatctccagagacaattccaagaacacgctgtatctgcaaatgaacagcctgagagccgaggacacggccgtatattactgtgcgaaaggggcccggggtggctacgattacggggactactggggccagggaaccctggtcaccgtgtcctca

SEQ ID NO: 104 - protein, 120 aa, Artificial Sequence
  YU536-C01 VH PRT
EVQLLESGGGLVQPGGSLRLSCAASGFTFSNYAMSWVRQAPGKGLEWVSAFSGSGGSTYYADSVKGRFTISRDNSKNTLYLQMNSLRAEDTAVYYCAKGARGGYDYGDYWGQGTLVTVSS

SEQ ID NO: 105 - DNA, 1344 bp, Artificial Sequence
  YU536-C01 VH complete DNA
gaggtgcagctgttggagtctgggggaggcttggtacagcctggggggtccctgagactctcctgtgcagcctctggattcacctttagcaactatgccatgagctgggtccgccaggctccagggaaggggctggagtgggtctcagcttttagtggtagtggtggtagcacatactacgcagactccgtgaagggccggttcaccatctccagagacaattccaagaacacgctgtatctgcaaatgaacagcctgagagccgaggacacggccgtatattactgtgcgaaaggggcccggggtggctacgattacggggactactggggccagggaaccctggtcaccgtgtcctcagctagcaccaagggcccatcggtcttccccctggcaccctcctccaagagcacctctgggggcacagcggccctgggctgcctggtcaaggactacttccccgaaccggtgacggtgtcgtggaactcaggcgccctgaccagcggcgtgcacaccttcccggctgtcctacagtcctcaggactctactccctcagcagcgtggtgaccgtgccctccagcagcttgggcacccagacctacatctgcaacgtgaatcacaagcccagcaacaccaaggtggacaagaaagttgagcccaaatcttgtgacaaaactcacacatgcccaccgtgcccagcacctccagtggccggaccgtcagtcttcctcttccccccaaaacccaaggacaccctcatgatctcccggacccctgaggtcacatgcgtggtggtgggcgtgagccacgaagaccctgaggtcaagttcaactggtacgtggacggcgtggaggtgcataatgccaagacaaagccgcgggaggagcagtacaacagcacgtaccgggtggtcagcgtcctcaccgtcctgcaccaggactggctgaatggcaaggagtacaagtgcaaggtctccaacaaacagctcccatcccccatcgagaaaaccatctccaaagccaaagggcagccccgagaaccacaggtgtacaccctgcccccatcccgggatgagctgaccaagaaccaggtcagcctgacctgcctggtcaaaggcttctatcccagcgacatcgccgtggagtgggagagcaatgggcagccggagaacaactacaagaccacgcctcccgtgctggactccgacggctccttcttcctctacagcaagctcaccgtggacaagagcaggtggcagcaggggaacgtcttctcatgctccgtgatgcatgaggctctgcacaaccactacacgcagaaaagcctctccctgtccccgggt

SEQ ID NO: 106 - protein, 448 aa, Artificial Sequence
  YU536-C01 VH complete PRT
EVQLLESGGGLVQPGGSLRLSCAASGFTFSNYAMSWVRQAPGKGLEWVSAFSGSGGSTYYADSVKGRFTISRDNSKNTLYLQMNSLRAEDTAVYYCAKGARGGYDYGDYWGQGTLVTVSSASTKGPSVFPLAPSSKSTSGGTAALGCLVKDYFPEPVTVSWNSGALTSGVHTFPAVLQSSGLYSLSSVVTVPSSSLGTQTYICNVNHKPSNTKVDKKVEPKSCDKTHTCPPCPAPPVAGPSVFLFPPKPKDTLMISRTPEVTCVVVGVSHEDPEVKFNWYVDGVEVHNAKTKPREEQYNSTYRVVSVLTVLHQDWLNGKEYKCKVSNKQLPSPIEKTISKAKGQPREPQVYTLPPSRDELTKNQVSLTCLVKGFYPSDIAVEWESNGQPENNYKTTPPVLDSDGSFFLYSKLTVDKSRWQQGNVFSCSVMHEALHNHYTQKSLSLSPG

SEQ ID NO: 107 - DNA, 642 bp, Artificial Sequence
  YU536-C01 VL complete DNA
gacatccagatgacccagtctccttccaccctgtctgcatctgtaggagacagagtcaccatcacttgccgggccagtcagagtattagtagctggttggcctggtatcagcagaaaccagggaaagcccctaagctcctgatctatgatgcctccagtttggaaagtggggttcgatcaaggttcagcggcagtggatctgggacagaattcactctcaccatcagcagcctgcagcctgatgattttgcaacttattactgccaacagtataatagttattctcccacgttcggccaagggaccaagctggagatcaaacgtacggtggctgcaccatctgtgttcatcttcccgccatctgatgagcagttgaaatctggaactgcctctgttgtgtgcctgctgaataacttctatcccagagaggccaaagtacagtggaaggtggataacgccctccaatcgggtaactcccaggagagtgtcacagagcaggacagcaaggacagcacctacagcctcagcagcaccctgacgctgagcaaagcagactacgagaaacacaaagtctacgcctgcgaagtcacccatcagggcctgagctcgcccgtcacaaagagcttcaacaggggagagtgt

SEQ ID NO: 108 - protein, 214 aa, Artificial Sequence
  YU536-C01 VL complete PRT
DIQMTQSPSTLSASVGDRVTITCRASQSISSWLAWYQQKPGKAPKLLIYDASSLESGVRSRFSGSGSGTEFTLTISSLQPDDFATYYCQQYNSYSPTFGQGTKLEIKRTVAAPSVFIFPPSDEQLKSGTASVVCLLNNFYPREAKVQWKVDNALQSGNSQESVTEQDSKDSTYSLSSTLTLSKADYEKHKVYACEVTHQGLSSPVTKSFNRGEC

SEQ ID NO: 109 - DNA, 15 bp, Artificial Sequence
  YU535-A06 HCDR1 DNA
agctatgccatgagc

SEQ ID NO: 110 - protein, 5 aa, Artificial Sequence
  YU535-A06 HCDR1 PRT
SYAMS

SEQ ID NO: 111 - DNA, 51 bp, Artificial Sequence
  YU535-A06 HCDR2 DNA
gctattggtggtagtggtggtagcacatactacgcagactccgtgaagggc

SEQ ID NO: 112 - protein, 16 aa, Artificial Sequence
  YU535-A06 HCDR2 PRT
AIGGSGGSTYYADSVK

SEQ ID NO: 113 - DNA, 33 bp, Artificial Sequence
  YU535-A06 HCDR3 DNA
ggcccccgctcttccggggactactttgactac

SEQ ID NO: 114 - protein, 11 aa, Artificial Sequence
  YU535-A06 HCDR3 PRT
GPRSSGDYFDY

SEQ ID NO: 115 - DNA, 33 bp, Artificial Sequence; identical to SEQ ID NO: 95
  YU535-A06 LCDR1 DNA

SEQ ID NO: 116 - protein, 11 aa, Artificial Sequence
  YU535-A06 LCDR1 PRT
RASQSISSWLA

SEQ ID NO: 117 - DNA, 21 bp, Artificial Sequence
  YU535-A06 LCDR2 DNA
gatgcctccagtttggaaagt

SEQ ID NO: 118 - protein, 7 aa, Artificial Sequence
  YU535-A06 LCDR2 PRT
DASSLES

SEQ ID NO: 119 - DNA, 27 bp, Artificial Sequence
  YU535-A06 LCDR3 DNA
caacagtataatagttattgggggacg

SEQ ID NO: 120 - protein, 9 aa, Artificial Sequence
  YU535-A06 LCDR3 PRT
QQYNSYWGT

SEQ ID NO: 121 - DNA, 321 bp, Artificial Sequence
  YU535-A06 VL DNA
gacatccagatgacccagtctccttccaccctgtctgcatctgtaggagacagagtcaccatcacttgccgggccagtcagagtattagtagctggttggcctggtatcagcagaaaccagggaaagcccctaagctcctgatctatgatgcctccagtttggaaagtggggtcccatcaaggttcagcggcagtggatctgggacagaattcactctcaccatcagcagcctgcagcctgatgattttgcaacttattactgccaacagtataatagttattgggggacgttcggccaagggaccaaggtggagatcaaa

SEQ ID NO: 122 - protein, 107 aa, Artificial Sequence
  YU535-A06 VL PRT
DIQMTQSPSTLSASVGDRVTITCRASQSISSWLAWYQQKPGKAPKLLIYDASSLESGVPSRFSGSGSGTEFTLTISSLQPDDFATYYCQQYNSYWGTFGQGTKVEIK

SEQ ID NO: 123 - DNA, 360 bp, Artificial Sequence
  YU535-A06 VH DNA
gaggtgcagctggtgcagtctgggggaggcttggtacagcctggggggtccctgagactctcctgtgcagcctctggattcacctttagcagctatgccatgagctgggtccgccaggctccagggaaggggctggagtgggtctcagctattggtggtagtggtggtagcacatactacgcagactccgtgaagggccggttcaccatctccagagacaattccaagaacacgctgtatctgcaaatgaacagcctgagagccgaggacacggccgtatattactgtgcgaaaggcccccgctcttccggggactactttgactactggggccagggaaccacggtcaccgtgtcctca

SEQ ID NO: 124 - protein, 120 aa, Artificial Sequence
  YU535-A06 VH PRT
EVQLVQSGGGLVQPGGSLRLSCAASGFTFSSYAMSWVRQAPGKGLEWVSAIGGSGGSTYYADSVKGRFTISRDNSKNTLYLQMNSLRAEDTAVYYCAKGPRSSGDYFDYWGQGTTVTVSS

SEQ ID NO: 125 - DNA, 1344 bp, Artificial Sequence
  YU535-A06 VH complete DNA
gaggtgcagctggtgcagtctgggggaggcttggtacagcctggggggtccctgagactctcctgtgcagcctctggattcacctttagcagctatgccatgagctgggtccgccaggctccagggaaggggctggagtgggtctcagctattggtggtagtggtggtagcacatactacgcagactccgtgaagggccggttcaccatctccagagacaattccaagaacacgctgtatctgcaaatgaacagcctgagagccgaggacacggccgtatattactgtgcgaaaggcccccgctcttccggggactactttgactactggggccagggaaccacggtcaccgtgtcctcagctagcaccaagggcccatcggtcttccccctggcaccctcctccaagagcacctctgggggcacagcggccctgggctgcctggtcaaggactacttccccgaaccggtgacggtgtcgtggaactcaggcgccctgaccagcggcgtgcacaccttcccggctgtcctacagtcctcaggactctactccctcagcagcgtggtgaccgtgccctccagcagcttgggcacccagacctacatctgcaacgtgaatcacaagcccagcaacaccaaggtggacaagaaagttgagcccaaatcttgtgacaaaactcacacatgcccaccgtgcccagcacctccagtggccggaccgtcagtcttcctcttccccccaaaacccaaggacaccctcatgatctcccggacccctgaggtcacatgcgtggtggtgggcgtgagccacgaagaccctgaggtcaagttcaactggtacgtggacggcgtggaggtgcataatgccaagacaaagccgcgggaggagcagtacaacagcacgtaccgggtggtcagcgtcctcaccgtcctgcaccaggactggctgaatggcaaggagtacaagtgcaaggtctccaacaaacagctcccatcccccatcgagaaaaccatctccaaagccaaagggcagccccgagaaccacaggtgtacaccctgcccccatcccgggatgagctgaccaagaaccaggtcagcctgacctgcctggtcaaaggcttctatcccagcgacatcgccgtggagtgggagagcaatgggcagccggagaacaactacaagaccacgcctcccgtgctggactccgacggctccttcttcctctacagcaagctcaccgtggacaagagcaggtggcagcaggggaacgtcttctcatgctccgtgatgcatgaggctctgcacaaccactacacgcagaaaagcctctccctgtccccgggt

SEQ ID NO: 126 - protein, 448 aa, Artificial Sequence
  YU535-A06 VH complete PRT
EVQLVQSGGGLVQPGGSLRLSCAASGFTFSSYAMSWVRQAPGKGLEWVSAIGGSGGSTYYADSVKGRFTISRDNSKNTLYLQMNSLRAEDTAVYYCAKGPRSSGDYFDYWGQGTTVTVSSASTKGPSVFPLAPSSKSTSGGTAALGCLVKDYFPEPVTVSWNSGALTSGVHTFPAVLQSSGLYSLSSVVTVPSSSLGTQTYICNVNHKPSNTKVDKKVEPKSCDKTHTCPPCPAPPVAGPSVFLFPPKPKDTLMISRTPEVTCVVVGVSHEDPEVKFNWYVDGVEVHNAKTKPREEQYNSTYRVVSVLTVLHQDWLNGKEYKCKVSNKQLPSPIEKTISKAKGQPREPQVYTLPPSRDELTKNQVSLTCLVKGFYPSDIAVEWESNGQPENNYKTTPPVLDSDGSFFLYSKLTVDKSRWQQGNVFSCSVMHEALHNHYTQKSLSLSPG

SEQ ID NO: 127 - DNA, 642 bp, Artificial Sequence
  YU535-A06 VL complete DNA
gacatccagatgacccagtctccttccaccctgtctgcatctgtaggagacagagtcaccatcacttgccgggccagtcagagtattagtagctggttggcctggtatcagcagaaaccagggaaagcccctaagctcctgatctatgatgcctccagtttggaaagtggggtcccatcaaggttcagcggcagtggatctgggacagaattcactctcaccatcagcagcctgcagcctgatgattttgcaacttattactgccaacagtataatagttattgggggacgttcggccaagggaccaaggtggagatcaaacgtacggtggctgcaccatctgtgttcatcttcccgccatctgatgagcagttgaaatctggaactgcctctgttgtgtgcctgctgaataacttctatcccagagaggccaaagtacagtggaaggtggataacgccctccaatcgggtaactcccaggagagtgtcacagagcaggacagcaaggacagcacctacagcctcagcagcaccctgacgctgagcaaagcagactacgagaaacacaaagtctacgcctgcgaagtcacccatcagggcctgagctcgcccgtcacaaagagcttcaacaggggagagtgt

SEQ ID NO: 128 - protein, 214 aa, Artificial Sequence
  YU535-A06 VL complete PRT
DIQMTQSPSTLSASVGDRVTITCRASQSISSWLAWYQQKPGKAPKLLIYDASSLESGVPSRFSGSGSGTEFTLTISSLQPDDFATYYCQQYNSYWGTFGQGTKVEIKRTVAAPSVFIFPPSDEQLKSGTASVVCLLNNFYPREAKVQWKVDNALQSGNSQESVTEQDSKDSTYSLSSTLTLSKADYEKHKVYACEVTHQGLSSPVTKSFNRGEC

SEQ ID NO: 129 - DNA, 15 bp, Artificial Sequence
  YU535-D12 HCDR1 DNA
agatatgccatgagc

SEQ ID NO: 130 - protein, 5 aa, Artificial Sequence
  YU535-D12 HCDR1 PRT
RYAMS

SEQ ID NO: 131 - DNA, 51 bp, Artificial Sequence
  YU535-D12 HCDR2 DNA
gctattagtggtagtggtggtagcacatactacgcagactccgtgaagggc

SEQ ID NO: 132 - protein, 16 aa, Artificial Sequence
  YU535-D12 HCDR2 PRT
AISGSGGSTYYADSVK

SEQ ID NO: 133 - DNA, 33 bp, Artificial Sequence
  YU535-D12 HCDR3 DNA
ggaccccgcagtggctgggactactttgactac

SEQ ID NO: 134 - protein, 11 aa, Artificial Sequence
  YU535-D12 HCDR3 PRT
GPRSGWDYFDY

SEQ ID NO: 135 - DNA, 33 bp, Artificial Sequence; identical to SEQ ID NO: 95
  YU535-D12 LCDR1 DNA

SEQ ID NO: 136 - protein, 11 aa, Artificial Sequence
  YU535-D12 LCDR1 PRT
RASQSISSWLA

SEQ ID NO: 137 - DNA, 21 bp, Artificial Sequence
  YU535-D12 LCDR2 DNA
gatgcctccagtttggaaagt

SEQ ID NO: 138 - protein, 7 aa, Artificial Sequence
  YU535-D12 LCDR2 PRT
DASSLES

SEQ ID NO: 139 - DNA, 30 bp, Artificial Sequence
  YU535-D12 LCDR3 DNA
caacagtataatagttatccgatgtacact

SEQ ID NO: 140 - protein, 10 aa, Artificial Sequence
  YU535-D12 LCDR3 PRT
QQYNSYPMYT

SEQ ID NO: 141 - DNA, 324 bp, Artificial Sequence
  YU535-D12 VL DNA
gacatccagttgacccagtctccttccaccctgtctgcatctgtaggagacagagtcaccatcacttgccgggccagtcagagtattagtagctggttggcctggtatcagcagaaaccagggaaagcccctaagctcctgatctatgatgcctccagtttggaaagtggggtcccatcaaggttcagcggcagtggatctgggacagaattcactctcaccatcagcagcctgcagcctgatgattttgcaacttattactgccaacagtataatagttatccgatgtacacttttggccaggggaccaagctggagatcaaa

SEQ ID NO: 142 - protein, 108 aa, Artificial Sequence
  YU535-D12 VL PRT
DIQLTQSPSTLSASVGDRVTITCRASQSISSWLAWYQQKPGKAPKLLIYDASSLESGVPSRFSGSGSGTEFTLTISSLQPDDFATYYCQQYNSYPMYTFGQGTKLEIK

SEQ ID NO: 143 - DNA, 360 bp, Artificial Sequence
  YU535-D12 VH DNA
caggtgcagctggtggagtctgggggaggcttggtgcaccctggggggtccctgagactctcctgtgcagcctctggattcacctttagcagatatgccatgagctgggtccgccaggctccagggaaggggctggagtgggtctcagctattagtggtagtggtggtagcacatactacgcagactccgtgaagggccggttcaccatctccagagacaattccaagaacacgctgtatctgcaaatgaacagcctgagagccgaggacacggccgtatattactgtgcgaaaggaccccgcagtggctgggactactttgactactggggccagggaaccctggtcaccgtgtcctca

SEQ ID NO: 144 - protein, 120 aa, Artificial Sequence
  YU535-D12 VH PRT
QVQLVESGGGLVHPGGSLRLSCAASGFTFSRYAMSWVRQAPGKGLEWVSAISGSGGSTYYADSVKGRFTISRDNSKNTLYLQMNSLRAEDTAVYYCAKGPRSGWDYFDYWGQGTLVTVSS

SEQ ID NO: 145 - DNA, 1344 bp, Artificial Sequence
  YU535-D12 VH complete DNA
caggtgcagctggtggagtctgggggaggcttggtgcaccctggggggtccctgagactctcctgtgcagcctctggattcacctttagcagatatgccatgagctgggtccgccaggctccagggaaggggctggagtgggtctcagctattagtggtagtggtggtagcacatactacgcagactccgtgaagggccggttcaccatctccagagacaattccaagaacacgctgtatctgcaaatgaacagcctgagagccgaggacacggccgtatattactgtgcgaaaggaccccgcagtggctgggactactttgactactggggccagggaaccctggtcaccgtgtcctcagctagcaccaagggcccatcggtcttccccctggcaccctcctccaagagcacctctgggggcacagcggccctgggctgcctggtcaaggactacttccccgaaccggtgacggtgtcgtggaactcaggcgccctgaccagcggcgtgcacaccttcccggctgtcctacagtcctcaggactctactccctcagcagcgtggtgaccgtgccctccagcagcttgggcacccagacctacatctgcaacgtgaatcacaagcccagcaacaccaaggtggacaagaaagttgagcccaaatcttgtgacaaaactcacacatgcccaccgtgcccagcacctccagtggccggaccgtcagtcttcctcttccccccaaaacccaaggacaccctcatgatctcccggacccctgaggtcacatgcgtggtggtgggcgtgagccacgaagaccctgaggtcaagttcaactggtacgtggacggcgtggaggtgcataatgccaagacaaagccgcgggaggagcagtacaacagcacgtaccgggtggtcagcgtcctcaccgtcctgcaccaggactggctgaatggcaaggagtacaagtgcaaggtctccaacaaacagctcccatcccccatcgagaaaaccatctccaaagccaaagggcagccccgagaaccacaggtgtacaccctgcccccatcccgggatgagctgaccaagaaccaggtcagcctgacctgcctggtcaaaggcttctatcccagcgacatcgccgtggagtgggagagcaatgggcagccggagaacaactacaagaccacgcctcccgtgctggactccgacggctccttcttcctctacagcaagctcaccgtggacaagagcaggtggcagcaggggaacgtcttctcatgctccgtgatgcatgaggctctgcacaaccactacacgcagaaaagcctctccctgtccccgggt

SEQ ID NO: 146 - protein, 448 aa, Artificial Sequence
  YU535-D12 VH complete PRT
QVQLVESGGGLVHPGGSLRLSCAASGFTFSRYAMSWVRQAPGKGLEWVSAISGSGGSTYYADSVKGRFTISRDNSKNTLYLQMNSLRAEDTAVYYCAKGPRSGWDYFDYWGQGTLVTVSSASTKGPSVFPLAPSSKSTSGGTAALGCLVKDYFPEPVTVSWNSGALTSGVHTFPAVLQSSGLYSLSSVVTVPSSSLGTQTYICNVNHKPSNTKVDKKVEPKSCDKTHTCPPCPAPPVAGPSVFLFPPKPKDTLMISRTPEVTCVVVGVSHEDPEVKFNWYVDGVEVHNAKTKPREEQYNSTYRVVSVLTVLHQDWLNGKEYKCKVSNKQLPSPIEKTISKAKGQPREPQVYTLPPSRDELTKNQVSLTCLVKGFYPSDIAVEWESNGQPENNYKTTPPVLDSDGSFFLYSKLTVDKSRWQQGNVFSCSVMHEALHNHYTQKSLSLSPG

SEQ ID NO: 147 - DNA, 645 bp, Artificial Sequence
  YU535-D12 VL complete DNA
gacatccagttgacccagtctccttccaccctgtctgcatctgtaggagacagagtcaccatcacttgccgggccagtcagagtattagtagctggttggcctggtatcagcagaaaccagggaaagcccctaagctcctgatctatgatgcctccagtttggaaagtggggtcccatcaaggttcagcggcagtggatctgggacagaattcactctcaccatcagcagcctgcagcctgatgattttgcaacttattactgccaacagtataatagttatccgatgtacacttttggccaggggaccaagctggagatcaaacgtacggtggctgcaccatctgtgttcatcttcccgccatctgatgagcagttgaaatctggaactgcctctgttgtgtgcctgctgaataacttctatcccagagaggccaaagtacagtggaaggtggataacgccctccaatcgggtaactcccaggagagtgtcacagagcaggacagcaaggacagcacctacagcctcagcagcaccctgacgctgagcaaagcagactacgagaaacacaaagtctacgcctgcgaagtcacccatcagggcctgagctcgcccgtcacaaagagcttcaacaggggagagtgt

SEQ ID NO: 148 - protein, 215 aa, Artificial Sequence
  YU535-D12 VL complete PRT
DIQLTQSPSTLSASVGDRVTITCRASQSISSWLAWYQQKPGKAPKLLIYDASSLESGVPSRFSGSGSGTEFTLTISSLQPDDFATYYCQQYNSYPMYTFGQGTKLEIKRTVAAPSVFIFPPSDEQLKSGTASVVCLLNNFYPREAKVQWKVDNALQSGNSQESVTEQDSKDSTYSLSSTLTLSKADYEKHKVYACEVTHQGLSSPVTKSFNRGEC

SEQ ID NO: 149 - DNA, 15 bp, Artificial Sequence
  YU534-C09 HCDR1 DNA
aattatgctgtcagc

SEQ ID NO: 150 - protein, 5 aa, Artificial Sequence
  YU534-C09 HCDR1 PRT
NYAVS

SEQ ID NO: 151 - DNA, 51 bp, Artificial Sequence
  YU534-C09 HCDR2 DNA
agaatcatccccaatcttggtcttacaaagtacgcgcaaaacttccagggc

SEQ ID NO: 152 - protein, 16 aa, Artificial Sequence
  YU534-C09 HCDR2 PRT
RIIPNLGLTKYAQNFQ

SEQ ID NO: 153 - DNA, 24 bp, Artificial Sequence
  YU534-C09 HCDR3 DNA
gggttgggcgcttaccccgattac

SEQ ID NO: 154 - protein, 8 aa, Artificial Sequence
  YU534-C09 HCDR3 PRT
GLGAYPDY

SEQ ID NO: 155 - DNA, 39 bp, Artificial Sequence
  YU534-C09 LCDR1 DNA
tctggaagcagctccaacatcggaaataatgctgtaaac

SEQ ID NO: 156 - protein, 13 aa, Artificial Sequence
  YU534-C09 LCDR1 PRT
SGSSSNIGNNAVN

SEQ ID NO: 157 - DNA, 21 bp, Artificial Sequence
  YU534-C09 LCDR2 DNA
tatgatgatctgctgccctca

SEQ ID NO: 158 - protein, 7 aa, Artificial Sequence
  YU534-C09 LCDR2 PRT
YDDLLPS

SEQ ID NO: 159 - DNA, 33 bp, Artificial Sequence
  YU534-C09 LCDR3 DNA
gcagcatgggatgacagcctgagtggtccggtg

SEQ ID NO: 160 - protein, 11 aa, Artificial Sequence
  YU534-C09 LCDR3 PRT
AAWDDSLSGPV

SEQ ID NO: 161 - DNA, 330 bp, Artificial Sequence
  YU534-C09 VL DNA
cagtctgtgctgactcagccaccctcggtgtctgaagcccccaggcagagggtcaccatctcctgttctggaagcagctccaacatcggaaataatgctgtaaactggtaccagcagctcccaggaaaggctcccaaactcctcatctattatgatgatctgctgccctcaggggtctctgaccgattctctggctccaagtctggcacctcagcctccctggccatcagtgggctccagtctgaggatgaggctgattattactgtgcagcatgggatgacagcctgagtggtccggtgttcggcggagggaccaagctgaccgtccta

SEQ ID NO: 162 - protein, 110 aa, Artificial Sequence
  YU534-C09 VL PRT
QSVLTQPPSVSEAPRQRVTISCSGSSSNIGNNAVNWYQQLPGKAPKLLIYYDDLLPSGVSDRFSGSKSGTSASLAISGLQSEDEADYYCAAWDDSLSGPVFGGGTKLTVL

SEQ ID NO: 163 - DNA, 351 bp, Artificial Sequence
  YU534-C09 VH DNA
caggttcagctggtgcagtctggggctgaggtgaagaagcctgggtcctcggtgaaagtctcctgcaaggcttctggagccacttccacgaattatgctgtcagctgggtgcgacaggcccctggacaaggacttcaatacatgggaagaatcatccccaatcttggtcttacaaagtacgcgcaaaacttccagggcggggtcacaattaccgcggacacatccacgagcacagtgtatatggagttgcgcagcctgagatctgaagacacggccgtctattattgtgtgagagggttgggcgcttaccccgattactggggccagggaaccctggtcaccgtgtcctca

SEQ ID NO: 164 - protein, 117 aa, Artificial Sequence
  YU534-C09 VH PRT
QVQLVQSGAEVKKPGSSVKVSCKASGATSTNYAVSWVRQAPGQGLQYMGRIIPNLGLTKYAQNFQGGVTITADTSTSTVYMELRSLRSEDTAVYYCVRGLGAYPDYWGQGTLVTVSS

SEQ ID NO: 165 - DNA, 1335 bp, Artificial Sequence
  YU534-C09 VH complete DNA
caggttcagctggtgcagtctggggctgaggtgaagaagcctgggtcctcggtgaaagtctcctgcaaggcttctggagccacttccacgaattatgctgtcagctgggtgcgacaggcccctggacaaggacttcaatacatgggaagaatcatccccaatcttggtcttacaaagtacgcgcaaaacttccagggcggggtcacaattaccgcggacacatccacgagcacagtgtatatggagttgcgcagcctgagatctgaagacacggccgtctattattgtgtgagagggttgggcgcttaccccgattactggggccagggaaccctggtcaccgtgtcctcagctagcaccaagggcccatcggtcttccccctggcaccctcctccaagagcacctctgggggcacagcggccctgggctgcctggtcaaggactacttccccgaaccggtgacggtgtcgtggaactcaggcgccctgaccagcggcgtgcacaccttcccggctgtcctacagtcctcaggactctactccctcagcagcgtggtgaccgtgccctccagcagcttgggcacccagacctacatctgcaacgtgaatcacaagcccagcaacaccaaggtggacaagaaagttgagcccaaatcttgtgacaaaactcacacatgcccaccgtgcccagcacctccagtggccggaccgtcagtcttcctcttccccccaaaacccaaggacaccctcatgatctcccggacccctgaggtcacatgcgtggtggtgggcgtgagccacgaagaccctgaggtcaagttcaactggtacgtggacggcgtggaggtgcataatgccaagacaaagccgcgggaggagcagtacaacagcacgtaccgggtggtcagcgtcctcaccgtcctgcaccaggactggctgaatggcaaggagtacaagtgcaaggtctccaacaaacagctcccatcccccatcgagaaaaccatctccaaagccaaagggcagccccgagaaccacaggtgtacaccctgcccccatcccgggatgagctgaccaagaaccaggtcagcctgacctgcctggtcaaaggcttctatcccagcgacatcgccgtggagtgggagagcaatgggcagccggagaacaactacaagaccacgcctcccgtgctggactccgacggctccttcttcctctacagcaagctcaccgtggacaagagcaggtggcagcaggggaacgtcttctcatgctccgtgatgcatgaggctctgcacaaccactacacgcagaaaagcctctccctgtccccgggt

SEQ ID NO: 166 - protein, 445 aa, Artificial Sequence
  YU534-C09 VH complete PRT
QVQLVQSGAEVKKPGSSVKVSCKASGATSTNYAVSWVRQAPGQGLQYMGRIIPNLGLTKYAQNFQGGVTITADTSTSTVYMELRSLRSEDTAVYYCVRGLGAYPDYWGQGTLVTVSSASTKGPSVFPLAPSSKSTSGGTAALGCLVKDYFPEPVTVSWNSGALTSGVHTFPAVLQSSGLYSLSSVVTVPSSSLGTQTYICNVNHKPSNTKVDKKVEPKSCDKTHTCPPCPAPPVAGPSVFLFPPKPKDTLMISRTPEVTCVVVGVSHEDPEVKFNWYVDGVEVHNAKTKPREEQYNSTYRVVSVLTVLHQDWLNGKEYKCKVSNKQLPSPIEKTISKAKGQPREPQVYTLPPSRDELTKNQVSLTCLVKGFYPSDIAVEWESNGQPENNYKTTPPVLDSDGSFFLYSKLTVDKSRWQQGNVFSCSVMHEALHNHYTQKSLSLSPG

SEQ ID NO: 167 - DNA, 648 bp, Artificial Sequence
  YU534-C09 VL complete DNA
cagtctgtgctgactcagccaccctcggtgtctgaagcccccaggcagagggtcaccatctcctgttctggaagcagctccaacatcggaaataatgctgtaaactggtaccagcagctcccaggaaaggctcccaaactcctcatctattatgatgatctgctgccctcaggggtctctgaccgattctctggctccaagtctggcacctcagcctccctggccatcagtgggctccagtctgaggatgaggctgattattactgtgcagcatgggatgacagcctgagtggtccggtgttcggcggagggaccaagctgaccgtcctaggtcagcccaaggctgcaccaagtgtcactctgttcccgccctcctctgaggagcttcaagccaacaaggccacactggtgtgtctcataagtgacttctacccgggagccgtgacagtggcctggaaggcagatagcagccccgtcaaggcgggagtggagaccaccacaccctccaaacaaagcaacaacaagtacgcggccagcagctatctgagcctgacgcctgagcagtggaagtcccacagaagctacagctgccaggtcacgcatgaagggagcaccgtggagaagacagtggcccctacagaatgttca

SEQ ID NO: 168 - protein, 216 aa, Artificial Sequence
  YU534-C09 VL complete PRT
QSVLTQPPSVSEAPRQRVTISCSGSSSNIGNNAVNWYQQLPGKAPKLLIYYDDLLPSGVSDRFSGSKSGTSASLAISGLQSEDEADYYCAAWDDSLSGPVFGGGTKLTVLGQPKAAPSVTLFPPSSEELQANKATLVCLISDFYPGAVTVAWKADSSPVKAGVETTTPSKQSNNKYAASSYLSLTPEQWKSHRSYSCQVTHEGSTVEKTVAPTECS

SEQ ID NO: 169 - DNA, 15 bp, Artificial Sequence
  YU534-C12 HCDR1 DNA
aactactatatgcac

SEQ ID NO: 170 - protein, 5 aa, Artificial Sequence
  YU534-C12 HCDR1 PRT
NYYMH

SEQ ID NO: 171 - DNA, 51 bp, Artificial Sequence
  YU534-C12 HCDR2 DNA
ataatcaaccctagtggtggtagcacaagctacgcacagaagttccagggc

SEQ ID NO: 172 - protein, 16 aa, Artificial Sequence
  YU534-C12 HCDR2 PRT
IINPSGGSTSYAQKFQ

SEQ ID NO: 173 - DNA, 33 bp, Artificial Sequence
  YU534-C12 HCDR3 DNA
gatctttatgcgatttttggagtggttattgac

SEQ ID NO: 174 - protein, 11 aa, Artificial Sequence
  YU534-C12 HCDR3 PRT
DLYAIFGVVID

SEQ ID NO: 175 - DNA, 42 bp, Artificial Sequence
  YU534-C12 LCDR1 DNA
gctggaaccagcagtgacgttggcggttataactatgtctca

SEQ ID NO: 176 - protein, 14 aa, Artificial Sequence
  YU534-C12 LCDR1 PRT
AGTSSDVGGYNYVS

SEQ ID NO: 177 - DNA, 21 bp, Artificial Sequence
  YU534-C12 LCDR2 DNA
gatgtcactaatcggccctca

SEQ ID NO: 178 - protein, 7 aa, Artificial Sequence
  YU534-C12 LCDR2 PRT
DVTNRPS

SEQ ID NO: 179 - DNA, 30 bp, Artificial Sequence; identical to SEQ ID NO: 39
  YU534-C12 LCDR3 DNA

SEQ ID NO: 180 - protein, 10 aa, Artificial Sequence
  YU534-C12 LCDR3 PRT
SSYTSSSTWV

SEQ ID NO: 181 - DNA, 330 bp, Artificial Sequence
  YU534-C12 VL DNA
cagtctgccctgactcagcctgcctccgtgtctgggtctcctggacagtcgatcaccatctcctgcgctggaaccagcagtgacgttggcggttataactatgtctcatggtaccaacaacacccaggcaaagcccccaaactcatgatttatgatgtcactaatcggccctcaggggtttctaatcgcttctctggctccaagtctggcaacacggcctccctgaccatctctgggctccaggctgaggacgaggctgattattactgcagctcatatacaagcagcagcacttgggtgttcggcggagggaccaaggtcaccgtccta

SEQ ID NO: 182 - protein, 110 aa, Artificial Sequence
  YU534-C12 VL PRT
QSALTQPASVSGSPGQSITISCAGTSSDVGGYNYVSWYQQHPGKAPKLMIYDVTNRPSGVSNRFSGSKSGNTASLTISGLQAEDEADYYCSSYTSSSTWVFGGGTKVTVL

SEQ ID NO: 183 - DNA, 360 bp, Artificial Sequence
  YU534-C12 VH DNA
caggttcagctggtgcagtctggggctgaggtgaagaagcctggggcctcagtgaaggtttcctgcaaggcatctggatacaccttcaccaactactatatgcactgggtgcgacaggcccctggacaagggcttgagtggatgggaataatcaaccctagtggtggtagcacaagctacgcacagaagttccagggcagagtcaccatgaccagggacacgtccacgagcacagtctacatggagctgagcagcctgagatctgaggacacggccgtgtattactgtgcgagagatctttatgcgatttttggagtggttattgactggggccagggaaccctggtcaccgtgtcctca

SEQ ID NO: 184 - protein, 120 aa, Artificial Sequence
  YU534-C12 VH PRT
QVQLVQSGAEVKKPGASVKVSCKASGYTFTNYYMHWVRQAPGQGLEWMGIINPSGGSTSYAQKFQGRVTMTRDTSTSTVYMELSSLRSEDTAVYYCARDLYAIFGVVIDWGQGTLVTVSS

SEQ ID NO: 185 - DNA, 1344 bp, Artificial Sequence
  YU534-C12 VH complete DNA
caggttcagctggtgcagtctggggctgaggtgaagaagcctggggcctcagtgaaggtttcctgcaaggcatctggatacaccttcaccaactactatatgcactgggtgcgacaggcccctggacaagggcttgagtggatgggaataatcaaccctagtggtggtagcacaagctacgcacagaagttccagggcagagtcaccatgaccagggacacgtccacgagcacagtctacatggagctgagcagcctgagatctgaggacacggccgtgtattactgtgcgagagatctttatgcgatttttggagtggttattgactggggccagggaaccctggtcaccgtgtcctcagctagcaccaagggcccatcggtcttccccctggcaccctcctccaagagcacctctgggggcacagcggccctgggctgcctggtcaaggactacttccccgaaccggtgacggtgtcgtggaactcaggcgccctgaccagcggcgtgcacaccttcccggctgtcctacagtcctcaggactctactccctcagcagcgtggtgaccgtgccctccagcagcttgggcacccagacctacatctgcaacgtgaatcacaagcccagcaacaccaaggtggacaagaaagttgagcccaaatcttgtgacaaaactcacacatgcccaccgtgcccagcacctccagtggccggaccgtcagtcttcctcttccccccaaaacccaaggacaccctcatgatctcccggacccctgaggtcacatgcgtggtggtgggcgtgagccacgaagaccctgaggtcaagttcaactggtacgtggacggcgtggaggtgcataatgccaagacaaagccgcgggaggagcagtacaacagcacgtaccgggtggtcagcgtcctcaccgtcctgcaccaggactggctgaatggcaaggagtacaagtgcaaggtctccaacaaacagctcccatcccccatcgagaaaaccatctccaaagccaaagggcagccccgagaaccacaggtgtacaccctgcccccatcccgggatgagctgaccaagaaccaggtcagcctgacctgcctggtcaaaggcttctatcccagcgacatcgccgtggagtgggagagcaatgggcagccggagaacaactacaagaccacgcctcccgtgctggactccgacggctccttcttcctctacagcaagctcaccgtggacaagagcaggtggcagcaggggaacgtcttctcatgctccgtgatgcatgaggctctgcacaaccactacacgcagaaaagcctctccctgtccccgggt

SEQ ID NO: 186 - protein, 448 aa, Artificial Sequence
  YU534-C12 VH complete PRT
QVQLVQSGAEVKKPGASVKVSCKASGYTFTNYYMHWVRQAPGQGLEWMGIINPSGGSTSYAQKFQGRVTMTRDTSTSTVYMELSSLRSEDTAVYYCARDLYAIFGVVIDWGQGTLVTVSSASTKGPSVFPLAPSSKSTSGGTAALGCLVKDYFPEPVTVSWNSGALTSGVHTFPAVLQSSGLYSLSSVVTVPSSSLGTQTYICNVNHKPSNTKVDKKVEPKSCDKTHTCPPCPAPPVAGPSVFLFPPKPKDTLMISRTPEVTCVVVGVSHEDPEVKFNWYVDGVEVHNAKTKPREEQYNSTYRVVSVLTVLHQDWLNGKEYKCKVSNKQLPSPIEKTISKAKGQPREPQVYTLPPSRDELTKNQVSLTCLVKGFYPSDIAVEWESNGQPENNYKTTPPVLDSDGSFFLYSKLTVDKSRWQQGNVFSCSVMHEALHNHYTQKSLSLSPG

SEQ ID NO: 187 - DNA, 648 bp, Artificial Sequence
  YU534-C12 VL complete DNA
cagtctgccctgactcagcctgcctccgtgtctgggtctcctggacagtcgatcaccatctcctgcgctggaaccagcagtgacgttggcggttataactatgtctcatggtaccaacaacacccaggcaaagcccccaaactcatgatttatgatgtcactaatcggccctcaggggtttctaatcgcttctctggctccaagtctggcaacacggcctccctgaccatctctgggctccaggctgaggacgaggctgattattactgcagctcatatacaagcagcagcacttgggtgttcggcggagggaccaaggtcaccgtcctaggtcagcccaaggctgcaccaagtgtcactctgttcccgccctcctctgaggagcttcaagccaacaaggccacactggtgtgtctcataagtgacttctacccgggagccgtgacagtggcctggaaggcagatagcagccccgtcaaggcgggagtggagaccaccacaccctccaaacaaagcaacaacaagtacgcggccagcagctatctgagcctgacgcctgagcagtggaagtcccacagaagctacagctgccaggtcacgcatgaagggagcaccgtggagaagacagtggcccctacagaatgttca

SEQ ID NO: 188 - protein, 216 aa, Artificial Sequence
  YU534-C12 VL complete PRT
QSALTQPASVSGSPGQSITISCAGTSSDVGGYNYVSWYQQHPGKAPKLMIYDVTNRPSGVSNRFSGSKSGNTASLTISGLQAEDEADYYCSSYTSSSTWVFGGGTKVTVLGQPKAAPSVTLFPPSSEELQANKATLVCLISDFYPGAVTVAWKADSSPVKAGVETTTPSKQSNNKYAASSYLSLTPEQWKSHRSYSCQVTHEGSTVEKTVAPTECS

SEQ ID NO: 189 - DNA, 15 bp, Artificial Sequence
  YU535-A02 HCDR1 DNA
agcaatgctatgcat

SEQ ID NO: 190 - protein, 5 aa, Artificial Sequence
  YU535-A02 HCDR1 PRT
SNAMH

SEQ ID NO: 191 - DNA, 51 bp, Artificial Sequence
  YU535-A02 HCDR2 DNA
tggatcaacgctggcaatggtaacacaaaatattcacagaagttccagggc

SEQ ID NO: 192 - protein, 16 aa, Artificial Sequence
  YU535-A02 HCDR2 PRT
WINAGNGNTKYSQKFQ

SEQ ID NO: 193 - DNA, 36 bp, Artificial Sequence
  YU535-A02 HCDR3 DNA
ggtcgagatggctacaatgtggactactttgaatac

SEQ ID NO: 194 - protein, 12 aa, Artificial Sequence
  YU535-A02 HCDR3 PRT
GRDGYNVDYFEY

SEQ ID NO: 195 - DNA, 33 bp, Artificial Sequence; identical to SEQ ID NO: 95
  YU535-A02 LCDR1 DNA

SEQ ID NO: 196 - protein, 11 aa, Artificial Sequence
  YU535-A02 LCDR1 PRT
RASQSISSWLA

SEQ ID NO: 197 - DNA, 21 bp, Artificial Sequence
  YU535-A02 LCDR2 DNA
gatgcctccagtttggaaagt

SEQ ID NO: 198 - protein, 7 aa, Artificial Sequence
  YU535-A02 LCDR2 PRT
DASSLES

SEQ ID NO: 199 - DNA, 27 bp, Artificial Sequence
  YU535-A02 LCDR3 DNA
caacagtataatagttacccgtggacg

SEQ ID NO: 200 - protein, 9 aa, Artificial Sequence
  YU535-A02 LCDR3 PRT
QQYNSYPWT

SEQ ID NO: 201 - DNA, 321 bp, Artificial Sequence
  YU535-A02 VL DNA
gacatcgtgatgacccagtctccttccaccctgtctgcatctgtaggagacagagtcaccatcacttgccgggccagtcagagtattagtagctggttggcctggtatcagcagaaaccagggaaagcccctaagctcctgatctatgatgcctccagtttggaaagtggggtcccatcaaggttcagcggcagtggatctgggacagaattcactctcaccatcagcagtctgcagcctgatgattttgcaacttattactgccaacagtataatagttacccgtggacgttcggccaagggaccaaagtggatatcaaa

SEQ ID NO: 202 - protein, 107 aa, Artificial Sequence
  YU535-A02 VL PRT
DIVMTQSPSTLSASVGDRVTITCRASQSISSWLAWYQQKPGKAPKLLIYDASSLESGVPSRFSGSGSGTEFTLTISSLQPDDFATYYCQQYNSYPWTFGQGTKVDIK

SEQ ID NO: 203 - DNA, 363 bp, Artificial Sequence
  YU535-A02 VH DNA
caggttcagctggtgcagtctggggctgaggtgaagaagcctggggcctcagtgaaggtttcctgcaaggcttctggatacaccttcactagcaatgctatgcattgggtgcgccaggcccccggacaaaggcttgagtggatgggatggatcaacgctggcaatggtaacacaaaatattcacagaagttccagggcagagtcaccattaccagggacacatccgcgagcacagcctacatggagctgagcagcctgagatctgaagacacggctgtgtattactgtgcgagaggtcgagatggctacaatgtggactactttgaatactggggccagggaaccctggtcaccgtgtcctca

SEQ ID NO: 204 - protein, 121 aa, Artificial Sequence
  YU535-A02 VH PRT
QVQLVQSGAEVKKPGASVKVSCKASGYTFTSNAMHWVRQAPGQRLEWMGWINAGNGNTKYSQKFQGRVTITRDTSASTAYMELSSLRSEDTAVYYCARGRDGYNVDYFEYWGQGTLVTVSS

SEQ ID NO: 205 - DNA, 1347 bp, Artificial Sequence
  YU535-A02 VH complete DNA
caggttcagctggtgcagtctggggctgaggtgaagaagcctggggcctcagtgaaggtttcctgcaaggcttctggatacaccttcactagcaatgctatgcattgggtgcgccaggcccccggacaaaggcttgagtggatgggatggatcaacgctggcaatggtaacacaaaatattcacagaagttccagggcagagtcaccattaccagggacacatccgcgagcacagcctacatggagctgagcagcctgagatctgaagacacggctgtgtattactgtgcgagaggtcgagatggctacaatgtggactactttgaatactggggccagggaaccctggtcaccgtgtcctcagctagcaccaagggcccatcggtcttccccctggcaccctcctccaagagcacctctgggggcacagcggccctgggctgcctggtcaaggactacttccccgaaccggtgacggtgtcgtggaactcaggcgccctgaccagcggcgtgcacaccttcccggctgtcctacagtcctcaggactctactccctcagcagcgtggtgaccgtgccctccagcagcttgggcacccagacctacatctgcaacgtgaatcacaagcccagcaacaccaaggtggacaagaaagttgagcccaaatcttgtgacaaaactcacacatgcccaccgtgcccagcacctccagtggccggaccgtcagtcttcctcttccccccaaaacccaaggacaccctcatgatctcccggacccctgaggtcacatgcgtggtggtgggcgtgagccacgaagaccctgaggtcaagttcaactggtacgtggacggcgtggaggtgcataatgccaagacaaagccgcgggaggagcagtacaacagcacgtaccgggtggtcagcgtcctcaccgtcctgcaccaggactggctgaatggcaaggagtacaagtgcaaggtctccaacaaacagctcccatcccccatcgagaaaaccatctccaaagccaaagggcagccccgagaaccacaggtgtacaccctgcccccatcccgggatgagctgaccaagaaccaggtcagcctgacctgcctggtcaaaggcttctatcccagcgacatcgccgtggagtgggagagcaatgggcagccggagaacaactacaagaccacgcctcccgtgctggactccgacggctccttcttcctctacagcaagctcaccgtggacaagagcaggtggcagcaggggaacgtcttctcatgctccgtgatgcatgaggctctgcacaaccactacacgcagaaaagcctctccctgtccccgggt

SEQ ID NO: 206 - protein, 448 aa, Artificial Sequence
  YU535-A02 VH complete PRT
QVQLVQSGAEVKKPGASVKVSCKASGYTFTSNAMHWVRQAPGQRLEWMGWINAGNGNTKYSQKFQGRVTITRDTSASTAYMELSSLRSEDTAVYYCARGRDGYNVDYFEYWGQGTLVTVSSASTKGPSVFPLAPSSKSTSGGTAALGCLVKDYFPEPVTVSWNSGALTSGVHTFPAVLQSSGLYSLSSVVTVPSSSLGTQTYICNVNHKPSNTKVDKKVEPKSCDKTHTCPPCPAPPVAGPSVFLFPPKPKDTLMISRTPEVTCVVVGVSHEDPEVKFNWYVDGVEVHNAKTKPREEQYNSTYRVVSVLTVLHQDWLNGKEYKCKVSNKQLPSPIEKTISKAKGQPREPQVYTLPPSRDELTKNQVSLTCLVKGFYPSDIAVEWESNGQPENNYKTTPPVLDSDGSFFLYSKLTVDKSRWQQGNVFSCSVMHEALHNHYTQKSLSLSP

SEQ ID NO: 207 - DNA, 642 bp, Artificial Sequence
  YU535-A02 VL complete DNA
gacatcgtgatgacccagtctccttccaccctgtctgcatctgtaggagacagagtcaccatcacttgccgggccagtcagagtattagtagctggttggcctggtatcagcagaaaccagggaaagcccctaagctcctgatctatgatgcctccagtttggaaagtggggtcccatcaaggttcagcggcagtggatctgggacagaattcactctcaccatcagcagtctgcagcctgatgattttgcaacttattactgccaacagtataatagttacccgtggacgttcggccaagggaccaaagtggatatcaaacgtacggtggctgcaccatctgtgttcatcttcccgccatctgatgagcagttgaaatctggaactgcctctgttgtgtgcctgctgaataacttctatcccagagaggccaaagtacagtggaaggtggataacgccctccaatcgggtaactcccaggagagtgtcacagagcaggacagcaaggacagcacctacagcctcagcagcaccctgacgctgagcaaagcagactacgagaaacacaaagtctacgcctgcgaagtcacccatcagggcctgagctcgcccgtcacaaagagcttcaacaggggagagtgt

SEQ ID NO: 208 - protein, 214 aa, Artificial Sequence
  YU535-A02 VL complete PRT
DIVMTQSPSTLSASVGDRVTITCRASQSISSWLAWYQQKPGKAPKLLIYDASSLESGVPSRFSGSGSGTEFTLTISSLQPDDFATYYCQQYNSYPWTFGQGTKVDIKRTVAAPSVFIFPPSDEQLKSGTASVVCLLNNFYPREAKVQWKVDNALQSGNSQESVTEQDSKDSTYSLSSTLTLSKADYEKHKVYACEVTHQGLSSPVTKSFNRGEC

SEQ ID NO: 209 - DNA, 15 bp, Artificial Sequence
  YU535-E07 HCDR1 DNA
agcaatgttatgcat

SEQ ID NO: 210 - protein, 5 aa, Artificial Sequence
  YU535-E07 HCDR1 PRT
SNVMH

SEQ ID NO: 211 - DNA, 51 bp, Artificial Sequence; identical to SEQ ID NO: 191
  YU535-E07 HCDR2 DNA

SEQ ID NO: 212 - protein, 16 aa, Artificial Sequence
  YU535-E07 HCDR2 PRT
WINAGNGNTKYSQKFQ

SEQ ID NO: 213 - DNA, 36 bp, Artificial Sequence
  YU535-E07 HCDR3 DNA
ggtcgagatggctacaatgtggactactttgactac

SEQ ID NO: 214 - protein, 12 aa, Artificial Sequence
  YU535-E07 HCDR3 PRT
GRDGYNVDYFDY

SEQ ID NO: 215 - DNA, 33 bp, Artificial Sequence; identical to SEQ ID NO: 95
  YU535-E07 LCDR1 DNA

SEQ ID NO: 216 - protein, 11 aa, Artificial Sequence
  YU535-E07 LCDR1 PRT
RASQSISSWLA

SEQ ID NO: 217 - DNA, 21 bp, Artificial Sequence
  YU535-E07 LCDR2 DNA
gatgcctccagtttggaaagt

SEQ ID NO: 218 - protein, 7 aa, Artificial Sequence
  YU535-E07 LCDR2 PRT
DASSLES

SEQ ID NO: 219 - DNA, 27 bp, Artificial Sequence
  YU535-E07 LCDR3 DNA
caacagtataatagttatccctggacg

SEQ ID NO: 220 - protein, 9 aa, Artificial Sequence
  YU535-E07 LCDR3 PRT
QQYNSYPWT

SEQ ID NO: 221 - DNA, 321 bp, Artificial Sequence
  YU535-E07 VL DNA
gacatccagatgacccagtctccttccaccctgtctgcatctgtaggagacagagtcaccatcacttgccgggccagtcagagtattagtagctggttggcctggtatcagcagaaaccagggaaagcccctaagctcctgatctatgatgcctccagtttggaaagtggggtcccatcaaggttcagcggcagtggatctgggacagaattcactctcaccatcagcagcctgcagcctgatgattttgcaacttattactgccaacagtataatagttatccctggacgttcggccaagggaccaagctggagatcaaa

SEQ ID NO: 222 - protein, 107 aa, Artificial Sequence
  YU535-E07 VL PRT
DIQMTQSPSTLSASVGDRVTITCRASQSISSWLAWYQQKPGKAPKLLIYDASSLESGVPSRFSGSGSGTEFTLTISSLQPDDFATYYCQQYNSYPWTFGQGTKLEIK

SEQ ID NO: 223 - DNA, 363 bp, Artificial Sequence
  YU535-E07 VH DNA
caggtgcagctggtgcagtctggggctgaggtgaagaagcctggggcctcagtgaaggcttcctgcaaggcttctggatacaccttcactagcaatgttatgcattgggtgcgccaggcccccggacaaaggcttgagtggatgggatggatcaacgctggcaatggtaacacaaaatattcacagaagttccagggcagagtcaccattaccagggacacatccgcgagcacagcctacatggagctgagcagcctgagatctgaagacacggctgtgtattactgtgcgagaggtcgagatggctacaatgtggactactttgactactggggccagggaaccctggtcaccgtgtcctca

SEQ ID NO: 224 - protein, 121 aa, Artificial Sequence
  YU535-E07 VH PRT
QVQLVQSGAEVKKPGASVKASCKASGYTFTSNVMHWVRQAPGQRLEWMGWINAGNGNTKYSQKFQGRVTITRDTSASTAYMELSSLRSEDTAVYYCARGRDGYNVDYFDYWGQGTLVTVSS

SEQ ID NO: 225 - DNA, 1347 bp, Artificial Sequence
  YU535-E07 VH complete DNA
caggtgcagctggtgcagtctggggctgaggtgaagaagcctggggcctcagtgaaggcttcctgcaaggcttctggatacaccttcactagcaatgttatgcattgggtgcgccaggcccccggacaaaggcttgagtggatgggatggatcaacgctggcaatggtaacacaaaatattcacagaagttccagggcagagtcaccattaccagggacacatccgcgagcacagcctacatggagctgagcagcctgagatctgaagacacggctgtgtattactgtgcgagaggtcgagatggctacaatgtggactactttgactactggggccagggaaccctggtcaccgtgtcctcagctagcaccaagggcccatcggtcttccccctggcaccctcctccaagagcacctctgggggcacagcggccctgggctgcctggtcaaggactacttccccgaaccggtgacggtgtcgtggaactcaggcgccctgaccagcggcgtgcacaccttcccggctgtcctacagtcctcaggactctactccctcagcagcgtggtgaccgtgccctccagcagcttgggcacccagacctacatctgcaacgtgaatcacaagcccagcaacaccaaggtggacaagaaagttgagcccaaatcttgtgacaaaactcacacatgcccaccgtgcccagcacctccagtggccggaccgtcagtcttcctcttccccccaaaacccaaggacaccctcatgatctcccggacccctgaggtcacatgcgtggtggtgggcgtgagccacgaagaccctgaggtcaagttcaactggtacgtggacggcgtggaggtgcataatgccaagacaaagccgcgggaggagcagtacaacagcacgtaccgggtggtcagcgtcctcaccgtcctgcaccaggactggctgaatggcaaggagtacaagtgcaaggtctccaacaaacagctcccatcccccatcgagaaaaccatctccaaagccaaagggcagccccgagaaccacaggtgtacaccctgcccccatcccgggatgagctgaccaagaaccaggtcagcctgacctgcctggtcaaaggcttctatcccagcgacatcgccgtggagtgggagagcaatgggcagccggagaacaactacaagaccacgcctcccgtgctggactccgacggctccttcttcctctacagcaagctcaccgtggacaagagcaggtggcagcaggggaacgtcttctcatgctccgtgatgcatgaggctctgcacaaccactacacgcagaaaagcctctccctgtccccgggt

SEQ ID NO: 226 - protein, 448 aa, Artificial Sequence
  YU535-E07 VH complete PRT
QVQLVQSGAEVKKPGASVKASCKASGYTFTSNVMHWVRQAPGQRLEWMGWINAGNGNTKYSQKFQGRVTITRDTSASTAYMELSSLRSEDTAVYYCARGRDGYNVDYFDYWGQGTLVTVSSASTKGPSVFPLAPSSKSTSGGTAALGCLVKDYFPEPVTVSWNSGALTSGVHTFPAVLQSSGLYSLSSVVTVPSSSLGTQTYICNVNHKPSNTKVDKKVEPKSCDKTHTCPPCPAPPVAGPSVFLFPPKPKDTLMISRTPEVTCVVVGVSHEDPEVKFNWYVDGVEVHNAKTKPREEQYNSTYRVVSVLTVLHQDWLNGKEYKCKVSNKQLPSPIEKTISKAKGQPREPQVYTLPPSRDELTKNQVSLTCLVKGFYPSDIAVEWESNGQPENNYKTTPPVLDSDGSFFLYSKLTVDKSRWQQGNVFSCSVMHEALHNHYTQKSLSLSP

SEQ ID NO: 227 - DNA, 642 bp, Artificial Sequence
  YU535-E07 VL complete DNA
gacatccagatgacccagtctccttccaccctgtctgcatctgtaggagacagagtcaccatcacttgccgggccagtcagagtattagtagctggttggcctggtatcagcagaaaccagggaaagcccctaagctcctgatctatgatgcctccagtttggaaagtggggtcccatcaaggttcagcggcagtggatctgggacagaattcactctcaccatcagcagcctgcagcctgatgattttgcaacttattactgccaacagtataatagttatccctggacgttcggccaagggaccaagctggagatcaaacgtacggtggctgcaccatctgtgttcatcttcccgccatctgatgagcagttgaaatctggaactgcctctgttgtgtgcctgctgaataacttctatcccagagaggccaaagtacagtggaaggtggataacgccctccaatcgggtaactcccaggagagtgtcacagagcaggacagcaaggacagcacctacagcctcagcagcaccctgacgctgagcaaagcagactacgagaaacacaaagtctacgcctgcgaagtcacccatcagggcctgagctcgcccgtcacaaagagcttcaacaggggagagtgt

SEQ ID NO: 228 - protein, 214 aa, Artificial Sequence
  YU535-E07 VL complete PRT
DIQMTQSPSTLSASVGDRVTITCRASQSISSWLAWYQQKPGKAPKLLIYDASSLESGVPSRFSGSGSGTEFTLTISSLQPDDFATYYCQQYNSYPWTFGQGTKLEIKRTVAAPSVFIFPPSDEQLKSGTASVVCLLNNFYPREAKVQWKVDNALQSGNSQESVTEQDSKDSTYSLSSTLTLSKADYEKHKVYACEVTHQGLSSPVTKSFNRGEC

SEQ ID NO: 229 - DNA, 15 bp, Artificial Sequence
  YU536-E12 HCDR1 DNA
agcaactacatgagc

SEQ ID NO: 230 - protein, 5 aa, Artificial Sequence
  YU536-E12 HCDR1 PRT
SNYMS

SEQ ID NO: 231 - DNA, 48 bp, Artificial Sequence
  YU536-E12 HCDR2 DNA
cttatttatagcggtggtagcacatactacgcagactccgtgaagggc

SEQ ID NO: 232 - protein, 16 aa, Artificial Sequence
  YU536-E12 HCDR2 PRT
LIYSGGSTYYADSVKG

SEQ ID NO: 233 - DNA, 39 bp, Artificial Sequence
  YU536-E12 HCDR3 DNA
gccctcgaggtcaatacagctggggactactttgactac

SEQ ID NO: 234 - protein, 13 aa, Artificial Sequence
  YU536-E12 HCDR3 PRT
ALEVNTAGDYFDY

SEQ ID NO: 235 - DNA, 42 bp, Artificial Sequence
  YU536-E12 LCDR1 DNA
actgggagcagctccaacatcggggcaggttatgatgtacac

SEQ ID NO: 236 - protein, 14 aa, Artificial Sequence
  YU536-E12 LCDR1 PRT
TGSSSNIGAGYDVH

SEQ ID NO: 237 - DNA, 21 bp, Artificial Sequence
  YU536-E12 LCDR2 DNA
ggtaacagcaatcggccctca

SEQ ID NO: 238 - protein, 7 aa, Artificial Sequence
  YU536-E12 LCDR2 PRT
GNSNRPS

SEQ ID NO: 239 - DNA, 33 bp, Artificial Sequence
  YU536-E12 LCDR3 DNA
cagtcctatgacagcagcctgagtggttgggtg

SEQ ID NO: 240 - protein, 11 aa, Artificial Sequence
  YU536-E12 LCDR3 PRT
QSYDSSLSGWV

SEQ ID NO: 241 - DNA, 333 bp, Artificial Sequence
  YU536-E12 VL DNA
cagtctgtgttgacgcagccgccctcagtgtctggggccccagggcagagggtcaccatctcctgcactgggagcagctccaacatcggggcaggttatgatgtacactggtaccagcagcttccaggaacagcccccaaactcctcatctatggtaacagcaatcggccctcaggggtccctgaccgattctctggctccaagtctggcacctcagcctccctggccatcactgggctccaggctgaggatgaggctgattattactgccagtcctatgacagcagcctgagtggttgggtgttcggcggagggaccaagctgaccgtccta

SEQ ID NO: 242 - protein, 111 aa, Artificial Sequence
  YU536-E12 VL PRT
QSVLTQPPSVSGAPGQRVTISCTGSSSNIGAGYDVHWYQQLPGTAPKLLIYGNSNRPSGVPDRFSGSKSGTSASLAITGLQAEDEADYYCQSYDSSLSGWVFGGGTKLTVL

SEQ ID NO: 243 - DNA, 363 bp, Artificial Sequence
  YU536-E12 VH DNA
gaggtgcagctggtgcagtctggaggaggcttgatccagcctggggggtccctgagactctcctgtgcagcctctgagttcaccgtcagtagcaactacatgagctgggtccgccaggctccagggaaggggctggagtgggtctcacttatttatagcggtggtagcacatactacgcagactccgtgaagggccgattcaccatctccagagacaattccaagaacacgctgtatcttcaaatgaacagcctgagagccgaggacacggccgtgtattactgtgcgagagccctcgaggtcaatacagctggggactactttgactactggggccagggaaccctggtcaccgtgtcctca

SEQ ID NO: 244 - protein, 121 aa, Artificial Sequence
  YU536-E12 VH PRT
EVQLVQSGGGLIQPGGSLRLSCAASEFTVSSNYMSWVRQAPGKGLEWVSLIYSGGSTYYADSVKGRFTISRDNSKNTLYLQMNSLRAEDTAVYYCARALEVNTAGDYFDYWGQGTLVTVSS

SEQ ID NO: 245 - DNA, 1347 bp, Artificial Sequence
  YU536-E12 VH complete DNA
gaggtgcagctggtgcagtctggaggaggcttgatccagcctggggggtccctgagactctcctgtgcagcctctgagttcaccgtcagtagcaactacatgagctgggtccgccaggctccagggaaggggctggagtgggtctcacttatttatagcggtggtagcacatactacgcagactccgtgaagggccgattcaccatctccagagacaattccaagaacacgctgtatcttcaaatgaacagcctgagagccgaggacacggccgtgtattactgtgcgagagccctcgaggtcaatacagctggggactactttgactactggggccagggaaccctggtcaccgtgtcctcagctagcaccaagggcccatcggtcttccccctggcaccctcctccaagagcacctctgggggcacagcggccctgggctgcctggtcaaggactacttccccgaaccggtgacggtgtcgtggaactcaggcgccctgaccagcggcgtgcacaccttcccggctgtcctacagtcctcaggactctactccctcagcagcgtggtgaccgtgccctccagcagcttgggcacccagacctacatctgcaacgtgaatcacaagcccagcaacaccaaggtggacaagaaagttgagcccaaatcttgtgacaaaactcacacatgcccaccgtgcccagcacctccagtggccggaccgtcagtcttcctcttccccccaaaacccaaggacaccctcatgatctcccggacccctgaggtcacatgcgtggtggtgggcgtgagccacgaagaccctgaggtcaagttcaactggtacgtggacggcgtggaggtgcataatgccaagacaaagccgcgggaggagcagtacaacagcacgtaccgggtggtcagcgtcctcaccgtcctgcaccaggactggctgaatggcaaggagtacaagtgcaaggtctccaacaaacagctcccatcccccatcgagaaaaccatctccaaagccaaagggcagccccgagaaccacaggtgtacaccctgcccccatcccgggatgagctgaccaagaaccaggtcagcctgacctgcctggtcaaaggcttctatcccagcgacatcgccgtggagtgggagagcaatgggcagccggagaacaactacaagaccacgcctcccgtgctggactccgacggctccttcttcctctacagcaagctcaccgtggacaagagcaggtggcagcaggggaacgtcttctcatgctccgtgatgcatgaggctctgcacaaccactacacgcagaaaagcctctccctgtccccgggt

SEQ ID NO: 246 - protein, 448 aa, Artificial Sequence
  YU536-E12 VH complete PRT
EVQLVQSGGGLIQPGGSLRLSCAASEFTVSSNYMSWVRQAPGKGLEWVSLIYSGGSTYYADSVKGRFTISRDNSKNTLYLQMNSLRAEDTAVYYCARALEVNTAGDYFDYWGQGTLVTVSSASTKGPSVFPLAPSSKSTSGGTAALGCLVKDYFPEPVTVSWNSGALTSGVHTFPAVLQSSGLYSLSSVVTVPSSSLGTQTYICNVNHKPSNTKVDKKVEPKSCDKTHTCPPCPAPPVAGPSVFLFPPKPKDTLMISRTPEVTCVVVGVSHEDPEVKFNWYVDGVEVHNAKTKPREEQYNSTYRVVSVLTVLHQDWLNGKEYKCKVSNKQLPSPIEKTISKAKGQPREPQVYTLPPSRDELTKNQVSLTCLVKGFYPSDIAVEWESNGQPENNYKTTPPVLDSDGSFFLYSKLTVDKSRWQQGNVFSCSVMHEALHNHYTQKSLSLSP

SEQ ID NO: 247 - DNA, 651 bp, Artificial Sequence
  YU536-E12 VL complete DNA
cagtctgtgttgacgcagccgccctcagtgtctggggccccagggcagagggtcaccatctcctgcactgggagcagctccaacatcggggcaggttatgatgtacactggtaccagcagcttccaggaacagcccccaaactcctcatctatggtaacagcaatcggccctcaggggtccctgaccgattctctggctccaagtctggcacctcagcctccctggccatcactgggctccaggctgaggatgaggctgattattactgccagtcctatgacagcagcctgagtggttgggtgttcggcggagggaccaagctgaccgtcctaggtcagcccaaggctgcaccaagtgtcactctgttcccgccctcctctgaggagcttcaagccaacaaggccacactggtgtgtctcataagtgacttctacccgggagccgtgacagtggcctggaaggcagatagcagccccgtcaaggcgggagtggagaccaccacaccctccaaacaaagcaacaacaagtacgcggccagcagctatctgagcctgacgcctgagcagtggaagtcccacagaagctacagctgccaggtcacgcatgaagggagcaccgtggagaagacagtggcccctacagaatgttca

SEQ ID NO: 248 - protein, 217 aa, Artificial Sequence
  YU536-E12 VL complete PRT
QSVLTQPPSVSGAPGQRVTISCTGSSSNIGAGYDVHWYQQLPGTAPKLLIYGNSNRPSGVPDRFSGSKSGTSASLAITGLQAEDEADYYCQSYDSSLSGWVFGGGTKLTVLGQPKAAPSVTLFPPSSEELQANKATLVCLISDFYPGAVTVAWKADSSPVKAGVETTTPSKQSNNKYAASSYLSLTPEQWKSHRSYSCQVTHEGSTVEKTVAPTECS

SEQ ID NO: 249 - DNA, 15 bp, Artificial Sequence
  YU537-E03 HCDR1 DNA
agcaactacatgagc

SEQ ID NO: 250 - protein, 5 aa, Artificial Sequence
  YU537-E03 HCDR1 PRT
SNYMS

SEQ ID NO: 251 - DNA, 48 bp, Artificial Sequence; identical to SEQ ID NO: 231
  YU537-E03 HCDR2 DNA

SEQ ID NO: 252 - protein, 16 aa, Artificial Sequence
  YU537-E03 HCDR2 PRT
LIYSGGSTYYADSVKG

SEQ ID NO: 253 - DNA, 39 bp, Artificial Sequence; identical to SEQ ID NO: 233
  YU537-E03 HCDR3 DNA

SEQ ID NO: 254 - protein, 13 aa, Artificial Sequence
  YU537-E03 HCDR3 PRT
ALEVNTAGDYFDY

SEQ ID NO: 255 - DNA, 42 bp, Artificial Sequence; identical to SEQ ID NO: 235
  YU537-E03 LCDR1 DNA

SEQ ID NO: 256 - protein, 14 aa, Artificial Sequence
  YU537-E03 LCDR1 PRT
TGSSSNIGAGYDVH

SEQ ID NO: 257 - DNA, 21 bp, Artificial Sequence
  YU537-E03 LCDR2 DNA
ggtaacagcaatcggccctca

SEQ ID NO: 258 - protein, 7 aa, Artificial Sequence
  YU537-E03 LCDR2 PRT
GNSNRPS

SEQ ID NO: 259 - DNA, 33 bp, Artificial Sequence
  YU537-E03 LCDR3 DNA
cagtcctatgacagcagcctgagtggttatgtc

SEQ ID NO: 260 - protein, 11 aa, Artificial Sequence
  YU537-E03 LCDR3 PRT
QSYDSSLSGYV

SEQ ID NO: 261 - DNA, 333 bp, Artificial Sequence
  YU537-E03 VL DNA
cagtctgtgttgacgcagccgccctcagtgtctggggccccagggcagagggtcaccatctcctgcactgggagcagctccaacatcggggcaggttatgatgtacactggtaccagcagcttccaggaacagcccccaaactcctcatctatggtaacagcaatcggccctcaggggtccctgaccgattctctggctccaagtctggcacctcagcctccctggccatcactgggctccaggctgaggatgaggctgattattactgccagtcctatgacagcagcctgagtggttatgtcttcggaactgggaccaagctgaccgtccta

SEQ ID NO: 262 - protein, 111 aa, Artificial Sequence
  YU537-E03 VL PRT
QSVLTQPPSVSGAPGQRVTISCTGSSSNIGAGYDVHWYQQLPGTAPKLLIYGNSNRPSGVPDRFSGSKSGTSASLAITGLQAEDEADYYCQSYDSSLSGYVFGTGTKLTVL

SEQ ID NO: 263 - DNA, 363 bp, Artificial Sequence
  YU537-E03 VH DNA
caggtgcagctggtgcagtctggaggaggcttgatccagcctggggggtccctgagactctcctgtgcagcctctgagttcaccgtcagtagcaactacatgagctgggtccgccaggctccagggaaggggctggagtgggtctcacttatttatagcggtggtagcacatactacgcagactccgtgaagggccgattcaccatctccagagacaattccaagaacacgctgtatcttcaaatgaacagcctgagagccgaggacacggccgtgtattactgtgcgagagccctcgaggtcaatacagctggggactactttgactactggggccagggaaccctggtcaccgtgtcctca

SEQ ID NO: 264 - protein, 121 aa, Artificial Sequence
  YU537-E03 VH PRT
QVQLVQSGGGLIQPGGSLRLSCAASEFTVSSNYMSWVRQAPGKGLEWVSLIYSGGSTYYADSVKGRFTISRDNSKNTLYLQMNSLRAEDTAVYYCARALEVNTAGDYFDYWGQGTLVTVSS

SEQ ID NO: 265 - DNA, 1347 bp, Artificial Sequence
  YU537-E03 VH complete DNA
caggtgcagctggtgcagtctggaggaggcttgatccagcctggggggtccctgagactctcctgtgcagcctctgagttcaccgtcagtagcaactacatgagctgggtccgccaggctccagggaaggggctggagtgggtctcacttatttatagcggtggtagcacatactacgcagactccgtgaagggccgattcaccatctccagagacaattccaagaacacgctgtatcttcaaatgaacagcctgagagccgaggacacggccgtgtattactgtgcgagagccctcgaggtcaatacagctggggactactttgactactggggccagggaaccctggtcaccgtgtcctcagctagcaccaagggcccatcggtcttccccctggcaccctcctccaagagcacctctgggggcacagcggccctgggctgcctggtcaaggactacttccccgaaccggtgacggtgtcgtggaactcaggcgccctgaccagcggcgtgcacaccttcccggctgtcctacagtcctcaggactctactccctcagcagcgtggtgaccgtgccctccagcagcttgggcacccagacctacatctgcaacgtgaatcacaagcccagcaacaccaaggtggacaagaaagttgagcccaaatcttgtgacaaaactcacacatgcccaccgtgcccagcacctccagtggccggaccgtcagtcttcctcttccccccaaaacccaaggacaccctcatgatctcccggacccctgaggtcacatgcgtggtggtgggcgtgagccacgaagaccctgaggtcaagttcaactggtacgtggacggcgtggaggtgcataatgccaagacaaagccgcgggaggagcagtacaacagcacgtaccgggtggtcagcgtcctcaccgtcctgcaccaggactggctgaatggcaaggagtacaagtgcaaggtctccaacaaacagctcccatcccccatcgagaaaaccatctccaaagccaaagggcagccccgagaaccacaggtgtacaccctgcccccatcccgggatgagctgaccaagaaccaggtcagcctgacctgcctggtcaaaggcttctatcccagcgacatcgccgtggagtgggagagcaatgggcagccggagaacaactacaagaccacgcctcccgtgctggactccgacggctccttcttcctctacagcaagctcaccgtggacaagagcaggtggcagcaggggaacgtcttctcatgctccgtgatgcatgaggctctgcacaaccactacacgcagaaaagcctctccctgtccccgggt

SEQ ID NO: 266 - protein, 448 aa, Artificial Sequence
  YU537-E03 VH complete PRT
QVQLVQSGGGLIQPGGSLRLSCAASEFTVSSNYMSWVRQAPGKGLEWVSLIYSGGSTYYADSVKGRFTISRDNSKNTLYLQMNSLRAEDTAVYYCARALEVNTAGDYFDYWGQGTLVTVSSASTKGPSVFPLAPSSKSTSGGTAALGCLVKDYFPEPVTVSWNSGALTSGVHTFPAVLQSSGLYSLSSVVTVPSSSLGTQTYICNVNHKPSNTKVDKKVEPKSCDKTHTCPPCPAPPVAGPSVFLFPPKPKDTLMISRTPEVTCVVVGVSHEDPEVKFNWYVDGVEVHNAKTKPREEQYNSTYRVVSVLTVLHQDWLNGKEYKCKVSNKQLPSPIEKTISKAKGQPREPQVYTLPPSRDELTKNQVSLTCLVKGFYPSDIAVEWESNGQPENNYKTTPPVLDSDGSFFLYSKLTVDKSRWQQGNVFSCSVMHEALHNHYTQKSLSLSP

SEQ ID NO: 267 - DNA, 651 bp, Artificial Sequence
  YU537-E03 VL complete DNA
cagtctgtgttgacgcagccgccctcagtgtctggggccccagggcagagggtcaccatctcctgcactgggagcagctccaacatcggggcaggttatgatgtacactggtaccagcagcttccaggaacagcccccaaactcctcatctatggtaacagcaatcggccctcaggggtccctgaccgattctctggctccaagtctggcacctcagcctccctggccatcactgggctccaggctgaggatgaggctgattattactgccagtcctatgacagcagcctgagtggttatgtcttcggaactgggaccaagctgaccgtcctaggtcagcccaaggctgcaccaagtgtcactctgttcccgccctcctctgaggagcttcaagccaacaaggccacactggtgtgtctcataagtgacttctacccgggagccgtgacagtggcctggaaggcagatagcagccccgtcaaggcgggagtggagaccaccacaccctccaaacaaagcaacaacaagtacgcggccagcagctatctgagcctgacgcctgagcagtggaagtcccacagaagctacagctgccaggtcacgcatgaagggagcaccgtggagaagacagtggcccctacagaatgttca

SEQ ID NO: 268 - protein, 217 aa, Artificial Sequence
  YU537-E03 VL complete PRT
QSVLTQPPSVSGAPGQRVTISCTGSSSNIGAGYDVHWYQQLPGTAPKLLIYGNSNRPSGVPDRFSGSKSGTSASLAITGLQAEDEADYYCQSYDSSLSGYVFGTGTKLTVLGQPKAAPSVTLFPPSSEELQANKATLVCLISDFYPGAVTVAWKADSSPVKAGVETTTPSKQSNNKYAASSYLSLTPEQWKSHRSYSCQVTHEGSTVEKTVAPTECS

SEQ ID NO: 269 - DNA, 15 bp, Artificial Sequence
  YU534-D06 HCDR1 DNA
agcaactacatgagc

SEQ ID NO: 270 - protein, 5 aa, Artificial Sequence
  YU534-D06 HCDR1 PRT
SNYMS

SEQ ID NO: 271 - DNA, 48 bp, Artificial Sequence
  YU534-D06 HCDR2 DNA
gttatttatagcggtggtagcacattctacgcagactccgtgaagggc

SEQ ID NO: 272 - protein, 16 aa, Artificial Sequence
  YU534-D06 HCDR2 PRT
VIYSGGSTFYADSVKG

SEQ ID NO: 273 - DNA, 54 bp, Artificial Sequence
  YU534-D06 HCDR3 DNA
gatgggtattacgatattttgactggttattattcagagaattcttttgatatc

SEQ ID NO: 274 - protein, 18 aa, Artificial Sequence
  YU534-D06 HCDR3 PRT
DGYYDILTGYYSENSFDI

SEQ ID NO: 275 - DNA, 42 bp, Artificial Sequence; identical to SEQ ID NO: 35
  YU534-D06 LCDR1 DNA

SEQ ID NO: 276 - protein, 14 aa, Artificial Sequence
  YU534-D06 LCDR1 PRT
TGTSSDVGGYNYVS

SEQ ID NO: 277 - DNA, 21 bp, Artificial Sequence
  YU534-D06 LCDR2 DNA
gaggtcagtaatcggccctca

SEQ ID NO: 278 - protein, 7 aa, Artificial Sequence
  YU534-D06 LCDR2 PRT
EVSNRPS

SEQ ID NO: 279 - DNA, 33 bp, Artificial Sequence
  YU534-D06 LCDR3 DNA
agctcatatacaagcagcagcacttatgtggta

SEQ ID NO: 280 - protein, 11 aa, Artificial Sequence
  YU534-D06 LCDR3 PRT
SSYTSSSTYVV

SEQ ID NO: 281 - DNA, 333 bp, Artificial Sequence
  YU534-D06 VL DNA
cagtctgccctgactcagcctgcctccgtgtctgggtctcctggacagtcgatcaccatctcctgcactggaaccagcagtgacgttggtggttataactatgtctcctggtaccaacagcacccaggcaaagcccccaaactcatgatttatgaggtcagtaatcggccctcaggggtttctaatcgcttctctggctccaagtctggcaacacggcctccctgaccatctctgggctccaggctgaggacgaggctgattattactgcagctcatatacaagcagcagcacttatgtggtattcggcggagggaccaagctgaccgtccta

SEQ ID NO: 282 - protein, 111 aa, Artificial Sequence
  YU534-D06 VL PRT
QSALTQPASVSGSPGQSITISCTGTSSDVGGYNYVSWYQQHPGKAPKLMIYEVSNRPSGVSNRFSGSKSGNTASLTISGLQAEDEADYYCSSYTSSSTYVVFGGGTKLTVL

SEQ ID NO: 283 - DNA, 378 bp, Artificial Sequence
  YU534-D06 VH DNA
caggtgcagctggtggagtctgggggaggcttggtccagcctggggggtccctgagactctcctgtgcagcctctggattcaccgtcagtagcaactacatgagctgggtccgccaggctccagggaaggggctggagtgggtctcagttatttatagcggtggtagcacattctacgcagactccgtgaagggcagattcaccatctccagagacaattccaagaacacgctgtatcttcaactgaacagcctgagagccgaggacacggctgtgtattactgtgcgagagatgggtattacgatattttgactggttattattcagagaattcttttgatatctggggccaagggacaatggtcaccgtgtcttca

SEQ ID NO: 284 - protein, 126 aa, Artificial Sequence
  YU534-D06 VH PRT
QVQLVESGGGLVQPGGSLRLSCAASGFTVSSNYMSWVRQAPGKGLEWVSVIYSGGSTFYADSVKGRFTISRDNSKNTLYLQLNSLRAEDTAVYYCARDGYYDILTGYYSENSFDIWGQGTMVTVSS

SEQ ID NO: 285 - DNA, 1362 bp, Artificial Sequence
  YU534-D06 VH complete DNA
caggtgcagctggtggagtctgggggaggcttggtccagcctggggggtccctgagactctcctgtgcagcctctggattcaccgtcagtagcaactacatgagctgggtccgccaggctccagggaaggggctggagtgggtctcagttatttatagcggtggtagcacattctacgcagactccgtgaagggcagattcaccatctccagagacaattccaagaacacgctgtatcttcaactgaacagcctgagagccgaggacacggctgtgtattactgtgcgagagatgggtattacgatattttgactggttattattcagagaattcttttgatatctggggccaagggacaatggtcaccgtgtcttcagctagcaccaagggcccatcggtcttccccctggcaccctcctccaagagcacctctgggggcacagcggccctgggctgcctggtcaaggactacttccccgaaccggtgacggtgtcgtggaactcaggcgccctgaccagcggcgtgcacaccttcccggctgtcctacagtcctcaggactctactccctcagcagcgtggtgaccgtgccctccagcagcttgggcacccagacctacatctgcaacgtgaatcacaagcccagcaacaccaaggtggacaagaaagttgagcccaaatcttgtgacaaaactcacacatgcccaccgtgcccagcacctccagtggccggaccgtcagtcttcctcttccccccaaaacccaaggacaccctcatgatctcccggacccctgaggtcacatgcgtggtggtgggcgtgagccacgaagaccctgaggtcaagttcaactggtacgtggacggcgtggaggtgcataatgccaagacaaagccgcgggaggagcagtacaacagcacgtaccgggtggtcagcgtcctcaccgtcctgcaccaggactggctgaatggcaaggagtacaagtgcaaggtctccaacaaacagctcccatcccccatcgagaaaaccatctccaaagccaaagggcagccccgagaaccacaggtgtacaccctgcccccatcccgggatgagctgaccaagaaccaggtcagcctgacctgcctggtcaaaggcttctatcccagcgacatcgccgtggagtgggagagcaatgggcagccggagaacaactacaagaccacgcctcccgtgctggactccgacggctccttcttcctctacagcaagctcaccgtggacaagagcaggtggcagcaggggaacgtcttctcatgctccgtgatgcatgaggctctgcacaaccactacacgcagaaaagcctctccctgtccccgggt

SEQ ID NO: 286 - protein, 454 aa, Artificial Sequence
  YU534-D06 VH complete PRT
QVQLVESGGGLVQPGGSLRLSCAASGFTVSSNYMSWVRQAPGKGLEWVSVIYSGGSTFYADSVKGRFTISRDNSKNTLYLQLNSLRAEDTAVYYCARDGYYDILTGYYSENSFDIWGQGTMVTVSSASTKGPSVFPLAPSSKSTSGGTAALGCLVKDYFPEPVTVSWNSGALTSGVHTFPAVLQSSGLYSLSSVVTVPSSSLGTQTYICNVNHKPSNTKVDKKVEPKSCDKTHTCPPCPAPPVAGPSVFLFPPKPKDTLMISRTPEVTCVVVGVSHEDPEVKFNWYVDGVEVHNAKTKPREEQYNSTYRVVSVLTVLHQDWLNGKEYKCKVSNKQLPSPIEKTISKAKGQPREPQVYTLPPSRDELTKNQVSLTCLVKGFYPSDIAVEWESNGQPENNYKTTPPVLDSDGSFFLYSKLTVDKSRWQQGNVFSCSVMHEALHNHYTQKSLSLSPG

SEQ ID NO: 287 - DNA, 651 bp, Artificial Sequence
  YU534-D06 VL complete DNA
cagtctgccctgactcagcctgcctccgtgtctgggtctcctggacagtcgatcaccatctcctgcactggaaccagcagtgacgttggtggttataactatgtctcctggtaccaacagcacccaggcaaagcccccaaactcatgatttatgaggtcagtaatcggccctcaggggtttctaatcgcttctctggctccaagtctggcaacacggcctccctgaccatctctgggctccaggctgaggacgaggctgattattactgcagctcatatacaagcagcagcacttatgtggtattcggcggagggaccaagctgaccgtcctaggtcagcccaaggctgcaccaagtgtcactctgttcccgccctcctctgaggagcttcaagccaacaaggccacactggtgtgtctcataagtgacttctacccgggagccgtgacagtggcctggaaggcagatagcagccccgtcaaggcgggagtggagaccaccacaccctccaaacaaagcaacaacaagtacgcggccagcagctatctgagcctgacgcctgagcagtggaagtcccacagaagctacagctgccaggtcacgcatgaagggagcaccgtggagaagacagtggcccctacagaatgttca

SEQ ID NO: 288 - protein, 217 aa, Artificial Sequence
  YU534-D06 VL complete PRT
QSALTQPASVSGSPGQSITISCTGTSSDVGGYNYVSWYQQHPGKAPKLMIYEVSNRPSGVSNRFSGSKSGNTASLTISGLQAEDEADYYCSSYTSSSTYVVFGGGTKLTVLGQPKAAPSVTLFPPSSEELQANKATLVCLISDFYPGAVTVAWKADSSPVKAGVETTTPSKQSNNKYAASSYLSLTPEQWKSHRSYSCQVTHEGSTVEKTVAPTECS

SEQ ID NO: 289 - DNA, 15 bp, Artificial Sequence
  YU536-E07 HCDR1 DNA
agcaactacatgagc

SEQ ID NO: 290 - protein, 5 aa, Artificial Sequence
  YU536-E07 HCDR1 PRT
SNYMS

SEQ ID NO: 291 - DNA, 48 bp, Artificial Sequence; identical to SEQ ID NO: 271
  YU536-E07 HCDR2 DNA

SEQ ID NO: 292 - protein, 16 aa, Artificial Sequence
  YU536-E07 HCDR2 PRT
VIYSGGSTFYADSVKG

SEQ ID NO: 293 - DNA, 27 bp, Artificial Sequence
  YU536-E07 HCDR3 DNA
gacttaggcccctacggtatggacgtc

SEQ ID NO: 294 - protein, 9 aa, Artificial Sequence
  YU536-E07 HCDR3 PRT
DLGPYGMDV

SEQ ID NO: 295 - DNA, 33 bp, Artificial Sequence
  YU536-E07 LCDR1 DNA
cgggccagtcagggcattagcagttatttagcc

SEQ ID NO: 296 - protein, 11 aa, Artificial Sequence
  YU536-E07 LCDR1 PRT
RASQGISSYLA

SEQ ID NO: 297 - DNA, 21 bp, Artificial Sequence
  YU536-E07 LCDR2 DNA
gctgcatccactttgcaaagt

SEQ ID NO: 298 - protein, 7 aa, Artificial Sequence
  YU536-E07 LCDR2 PRT
AASTLQS

SEQ ID NO: 299 - DNA, 30 bp, Artificial Sequence
  YU536-E07 LCDR3 DNA
caacagcttaatagttaccctccgtacact

SEQ ID NO: 300 - protein, 10 aa, Artificial Sequence
  YU536-E07 LCDR3 PRT
QQLNSYPPYT

SEQ ID NO: 301 - DNA, 324 bp, Artificial Sequence
  YU536-E07 VL DNA
gacatccagttgacccagtctccatccttcctgtctgcatctgtaggagacagagtcaccatcacttgccgggccagtcagggcattagcagttatttagcctggtatcagcaaaaaccagggaaagcccctaagctcctgatctatgctgcatccactttgcaaagtggggtcccatcaaggttcagcggcagtggatctgggacagaattcactctcacaatcagcagcctgcagcctgaagattttgcaacttattactgtcaacagcttaatagttaccctccgtacacttttggccaggggaccaagctggagatcaaa

SEQ ID NO: 302 - protein, 108 aa, Artificial Sequence
  YU536-E07 VL PRT
DIQLTQSPSFLSASVGDRVTITCRASQGISSYLAWYQQKPGKAPKLLIYAASTLQSGVPSRFSGSGSGTEFTLTISSLQPEDFATYYCQQLNSYPPYTFGQGTKLEIK

SEQ ID NO: 303 - DNA, 351 bp, Artificial Sequence
  YU536-E07 VH DNA
gaggtgcagctggtggagtctgggggaggcttggtccagcctggggggtccctgagactctcctgtgcagcctctggattcaccgtcagtagcaactacatgagctgggtccgccaggctccagggaaggggctggagtgggtctcagttatttatagcggtggtagcacattctacgcagactccgtgaagggcagattcaccatctccagagacaattccaagaacacgctgtatctccaaatgaacagcctgagagccgaggacacggctgtgtattactgtgcgagagacttaggcccctacggtatggacgtctggggccaagggaccctggtcaccgtgtcctca

SEQ ID NO: 304 - protein, 117 aa, Artificial Sequence
  YU536-E07 VH PRT
EVQLVESGGGLVQPGGSLRLSCAASGFTVSSNYMSWVRQAPGKGLEWVSVIYSGGSTFYADSVKGRFTISRDNSKNTLYLQMNSLRAEDTAVYYCARDLGPYGMDVWGQGTLVTVSS

SEQ ID NO: 305 - DNA, 1335 bp, Artificial Sequence
  YU536-E07 VH complete DNA
gaggtgcagctggtggagtctgggggaggcttggtccagcctggggggtccctgagactctcctgtgcagcctctggattcaccgtcagtagcaactacatgagctgggtccgccaggctccagggaaggggctggagtgggtctcagttatttatagcggtggtagcacattctacgcagactccgtgaagggcagattcaccatctccagagacaattccaagaacacgctgtatctccaaatgaacagcctgagagccgaggacacggctgtgtattactgtgcgagagacttaggcccctacggtatggacgtctggggccaagggaccctggtcaccgtgtcctcagctagcaccaagggcccatcggtcttccccctggcaccctcctccaagagcacctctgggggcacagcggccctgggctgcctggtcaaggactacttccccgaaccggtgacggtgtcgtggaactcaggcgccctgaccagcggcgtgcacaccttcccggctgtcctacagtcctcaggactctactccctcagcagcgtggtgaccgtgccctccagcagcttgggcacccagacctacatctgcaacgtgaatcacaagcccagcaacaccaaggtggacaagaaagttgagcccaaatcttgtgacaaaactcacacatgcccaccgtgcccagcacctccagtggccggaccgtcagtcttcctcttccccccaaaacccaaggacaccctcatgatctcccggacccctgaggtcacatgcgtggtggtgggcgtgagccacgaagaccctgaggtcaagttcaactggtacgtggacggcgtggaggtgcataatgccaagacaaagccgcgggaggagcagtacaacagcacgtaccgggtggtcagcgtcctcaccgtcctgcaccaggactggctgaatggcaaggagtacaagtgcaaggtctccaacaaacagctcccatcccccatcgagaaaaccatctccaaagccaaagggcagccccgagaaccacaggtgtacaccctgcccccatcccgggatgagctgaccaagaaccaggtcagcctgacctgcctggtcaaaggcttctatcccagcgacatcgccgtggagtgggagagcaatgggcagccggagaacaactacaagaccacgcctcccgtgctggactccgacggctccttcttcctctacagcaagctcaccgtggacaagagcaggtggcagcaggggaacgtcttctcatgctccgtgatgcatgaggctctgcacaaccactacacgcagaaaagcctctccctgtccccgggt

SEQ ID NO: 306 - protein, 445 aa, Artificial Sequence
  YU536-E07 VH complete PRT
EVQLVESGGGLVQPGGSLRLSCAASGFTVSSNYMSWVRQAPGKGLEWVSVIYSGGSTFYADSVKGRFTISRDNSKNTLYLQMNSLRAEDTAVYYCARDLGPYGMDVWGQGTLVTVSSASTKGPSVFPLAPSSKSTSGGTAALGCLVKDYFPEPVTVSWNSGALTSGVHTFPAVLQSSGLYSLSSVVTVPSSSLGTQTYICNVNHKPSNTKVDKKVEPKSCDKTHTCPPCPAPPVAGPSVFLFPPKPKDTLMISRTPEVTCVVVGVSHEDPEVKFNWYVDGVEVHNAKTKPREEQYNSTYRVVSVLTVLHQDWLNGKEYKCKVSNKQLPSPIEKTISKAKGQPREPQVYTLPPSRDELTKNQVSLTCLVKGFYPSDIAVEWESNGQPENNYKTTPPVLDSDGSFFLYSKLTVDKSRWQQGNVFSCSVMHEALHNHYTQKSLSLSPG

SEQ ID NO: 307 - DNA, 645 bp, Artificial Sequence
  YU536-E07 VL complete DNA
gacatccagttgacccagtctccatccttcctgtctgcatctgtaggagacagagtcaccatcacttgccgggccagtcagggcattagcagttatttagcctggtatcagcaaaaaccagggaaagcccctaagctcctgatctatgctgcatccactttgcaaagtggggtcccatcaaggttcagcggcagtggatctgggacagaattcactctcacaatcagcagcctgcagcctgaagattttgcaacttattactgtcaacagcttaatagttaccctccgtacacttttggccaggggaccaagctggagatcaaacgtacggtggctgcaccatctgtgttcatcttcccgccatctgatgagcagttgaaatctggaactgcctctgttgtgtgcctgctgaataacttctatcccagagaggccaaagtacagtggaaggtggataacgccctccaatcgggtaactcccaggagagtgtcacagagcaggacagcaaggacagcacctacagcctcagcagcaccctgacgctgagcaaagcagactacgagaaacacaaagtctacgcctgcgaagtcacccatcagggcctgagctcgcccgtcacaaagagcttcaacaggggagagtgt

SEQ ID NO: 308 - protein, 215 aa, Artificial Sequence
  YU536-E07 VL complete PRT
DIQLTQSPSFLSASVGDRVTITCRASQGISSYLAWYQQKPGKAPKLLIYAASTLQSGVPSRFSGSGSGTEFTLTISSLQPEDFATYYCQQLNSYPPYTFGQGTKLEIKRTVAAPSVFIFPPSDEQLKSGTASVVCLLNNFYPREAKVQWKVDNALQSGNSQESVTEQDSKDSTYSLSSTLTLSKADYEKHKVYACEVTHQGLSSPVTKSFNRGEC

SEQ ID NO: 309 - DNA, 15 bp, Artificial Sequence
  YU534-B03 HCDR1 DNA
agcaactacatgagc

SEQ ID NO: 310 - protein, 5 aa, Artificial Sequence
  YU534-B03 HCDR1 PRT
SNYMS

SEQ ID NO: 311 - DNA, 48 bp, Artificial Sequence; identical to SEQ ID NO: 271
  YU534-B03 HCDR2 DNA

SEQ ID NO: 312 - protein, 16 aa, Artificial Sequence
  YU534-B03 HCDR2 PRT
VIYSGGSTFYADSVKG

SEQ ID NO: 313 - DNA, 27 bp, Artificial Sequence
  YU534-B03 HCDR3 DNA
gacttaggcccctacggtatggacgtc

SEQ ID NO: 314 - protein, 9 aa, Artificial Sequence
  YU534-B03 HCDR3 PRT
DLGPYGMDV

SEQ ID NO: 315 - DNA, 42 bp, Artificial Sequence; identical to SEQ ID NO: 235
  YU534-B03 LCDR1 DNA

SEQ ID NO: 316 - protein, 14 aa, Artificial Sequence
  YU534-B03 LCDR1 PRT
TGSSSNIGAGYDVH

SEQ ID NO: 317 - DNA, 21 bp, Artificial Sequence
  YU534-B03 LCDR2 DNA
ggtagcagcaatcggccctca

SEQ ID NO: 318 - protein, 7 aa, Artificial Sequence
  YU534-B03 LCDR2 PRT
GSSNRPS

SEQ ID NO: 319 - DNA, 33 bp, Artificial Sequence
  YU534-B03 LCDR3 DNA
gcagcatgggatgacagtttgagtgtcgacgtg

SEQ ID NO: 320 - protein, 11 aa, Artificial Sequence
  YU534-B03 LCDR3 PRT
AAWDDSLSVDV

SEQ ID NO: 321 - DNA, 333 bp, Artificial Sequence
  YU534-B03 VL DNA
cagtctgtgttgacgcagccgccctcagtgtctggggccccagggcagagggtcaccatctcctgcactgggagcagctccaacatcggggcaggttatgatgtacactggtaccagcagcttccaggaacagcccccaaactcctcatctatggtagcagcaatcggccctcaggggtccctgaccgattctctggctccaagtctggcacctcagcctccctggccatcactgggctccaggctgaggatgaggctgattattactgtgcagcatgggatgacagtttgagtgtcgacgtgttcggcggagggaccaagctgaccgtccta

SEQ ID NO: 322 - protein, 111 aa, Artificial Sequence
  YU534-B03 VL PRT
QSVLTQPPSVSGAPGQRVTISCTGSSSNIGAGYDVHWYQQLPGTAPKLLIYGSSNRPSGVPDRFSGSKSGTSASLAITGLQAEDEADYYCAAWDDSLSVDVFGGGTKLTVL

SEQ ID NO: 323 - DNA, 351 bp, Artificial Sequence
  YU534-B03 VH DNA
caggtgcagctggtggagtctgggggaggcttggtccagcctggggggtccctgagactctcctgtgcagcctctggattcaccgtcagtagcaactacatgagctgggtccgccaggctccagggaaggggctggagtgggtctcagttatttatagcggtggtagcacattctacgcagactccgtgaagggcagattcaccatctccagagacaattccaagaacacgctgtatcttcaaatgaacagcctgagagccgaggacacggctgtgtattactgtgcgagagacttaggcccctacggtatggacgtctggggccaagggaccctggtcaccgtgtcctca

SEQ ID NO: 324 - protein, 117 aa, Artificial Sequence
  YU534-B03 VH PRT
QVQLVESGGGLVQPGGSLRLSCAASGFTVSSNYMSWVRQAPGKGLEWVSVIYSGGSTFYADSVKGRFTISRDNSKNTLYLQMNSLRAEDTAVYYCARDLGPYGMDVWGQGTLVTVSS

SEQ ID NO: 325 - DNA, 1335 bp, Artificial Sequence
  YU534-B03 VH complete DNA
caggtgcagctggtggagtctgggggaggcttggtccagcctggggggtccctgagactctcctgtgcagcctctggattcaccgtcagtagcaactacatgagctgggtccgccaggctccagggaaggggctggagtgggtctcagttatttatagcggtggtagcacattctacgcagactccgtgaagggcagattcaccatctccagagacaattccaagaacacgctgtatcttcaaatgaacagcctgagagccgaggacacggctgtgtattactgtgcgagagacttaggcccctacggtatggacgtctggggccaagggaccctggtcaccgtgtcctcagctagcaccaagggcccatcggtcttccccctggcaccctcctccaagagcacctctgggggcacagcggccctgggctgcctggtcaaggactacttccccgaaccggtgacggtgtcgtggaactcaggcgccctgaccagcggcgtgcacaccttcccggctgtcctacagtcctcaggactctactccctcagcagcgtggtgaccgtgccctccagcagcttgggcacccagacctacatctgcaacgtgaatcacaagcccagcaacaccaaggtggacaagaaagttgagcccaaatcttgtgacaaaactcacacatgcccaccgtgcccagcacctccagtggccggaccgtcagtcttcctcttccccccaaaacccaaggacaccctcatgatctcccggacccctgaggtcacatgcgtggtggtgggcgtgagccacgaagaccctgaggtcaagttcaactggtacgtggacggcgtggaggtgcataatgccaagacaaagccgcgggaggagcagtacaacagcacgtaccgggtggtcagcgtcctcaccgtcctgcaccaggactggctgaatggcaaggagtacaagtgcaaggtctccaacaaacagctcccatcccccatcgagaaaaccatctccaaagccaaagggcagccccgagaaccacaggtgtacaccctgcccccatcccgggatgagctgaccaagaaccaggtcagcctgacctgcctggtcaaaggcttctatcccagcgacatcgccgtggagtgggagagcaatgggcagccggagaacaactacaagaccacgcctcccgtgctggactccgacggctccttcttcctctacagcaagctcaccgtggacaagagcaggtggcagcaggggaacgtcttctcatgctccgtgatgcatgaggctctgcacaaccactacacgcagaaaagcctctccctgtccccgggt

SEQ ID NO: 326 - protein, 445 aa, Artificial Sequence
  YU534-B03 VH complete PRT
QVQLVESGGGLVQPGGSLRLSCAASGFTVSSNYMSWVRQAPGKGLEWVSVIYSGGSTFYADSVKGRFTISRDNSKNTLYLQMNSLRAEDTAVYYCARDLGPYGMDVWGQGTLVTVSSASTKGPSVFPLAPSSKSTSGGTAALGCLVKDYFPEPVTVSWNSGALTSGVHTFPAVLQSSGLYSLSSVVTVPSSSLGTQTYICNVNHKPSNTKVDKKVEPKSCDKTHTCPPCPAPPVAGPSVFLFPPKPKDTLMISRTPEVTCVVVGVSHEDPEVKFNWYVDGVEVHNAKTKPREEQYNSTYRVVSVLTVLHQDWLNGKEYKCKVSNKQLPSPIEKTISKAKGQPREPQVYTLPPSRDELTKNQVSLTCLVKGFYPSDIAVEWESNGQPENNYKTTPPVLDSDGSFFLYSKLTVDKSRWQQGNVFSCSVMHEALHNHYTQKSLSLSPG

SEQ ID NO: 327 - DNA, 651 bp, Artificial Sequence
  YU534-B03 VL complete DNA
cagtctgtgttgacgcagccgccctcagtgtctggggccccagggcagagggtcaccatctcctgcactgggagcagctccaacatcggggcaggttatgatgtacactggtaccagcagcttccaggaacagcccccaaactcctcatctatggtagcagcaatcggccctcaggggtccctgaccgattctctggctccaagtctggcacctcagcctccctggccatcactgggctccaggctgaggatgaggctgattattactgtgcagcatgggatgacagtttgagtgtcgacgtgttcggcggagggaccaagctgaccgtcctaggtcagcccaaggctgcaccaagtgtcactctgttcccgccctcctctgaggagcttcaagccaacaaggccacactggtgtgtctcataagtgacttctacccgggagccgtgacagtggcctggaaggcagatagcagccccgtcaaggcgggagtggagaccaccacaccctccaaacaaagcaacaacaagtacgcggccagcagctatctgagcctgacgcctgagcagtggaagtcccacagaagctacagctgccaggtcacgcatgaagggagcaccgtggagaagacagtggcccctacagaatgttca

SEQ ID NO: 328 - protein, 217 aa, Artificial Sequence
  YU534-B03 VL complete PRT
QSVLTQPPSVSGAPGQRVTISCTGSSSNIGAGYDVHWYQQLPGTAPKLLIYGSSNRPSGVPDRFSGSKSGTSASLAITGLQAEDEADYYCAAWDDSLSVDVFGGGTKLTVLGQPKAAPSVTLFPPSSEELQANKATLVCLISDFYPGAVTVAWKADSSPVKAGVETTTPSKQSNNKYAASSYLSLTPEQWKSHRSYSCQVTHEGSTVEKTVAPTECS

SEQ ID NO: 329 - DNA, 15 bp, Artificial Sequence
  YU534-D10 HCDR1 DNA
agcaactacatgagc

SEQ ID NO: 330 - protein, 5 aa, Artificial Sequence
  YU534-D10 HCDR1 PRT
SNYMS

SEQ ID NO: 331 - DNA, 48 bp, Artificial Sequence
  YU534-D10 HCDR2 DNA
gttatttatagcggtggtagcacatactacgcagactccgtgaagggc

SEQ ID NO: 332 - protein, 16 aa, Artificial Sequence
  YU534-D10 HCDR2 PRT
VIYSGGSTYYADSVKG

SEQ ID NO: 333 - DNA, 27 bp, Artificial Sequence
  YU534-D10 HCDR3 DNA
gatttggttaactggggaatggactac

SEQ ID NO: 334 - protein, 9 aa, Artificial Sequence
  YU534-D10 HCDR3 PRT
DLVNWGMDY

SEQ ID NO: 335 - DNA, 42 bp, Artificial Sequence; identical to SEQ ID NO: 235
  YU534-D10 LCDR1 DNA

SEQ ID NO: 336 - protein, 14 aa, Artificial Sequence
  YU534-D10 LCDR1 PRT
TGSSSNIGAGYDVH

SEQ ID NO: 337 - DNA, 21 bp, Artificial Sequence
  YU534-D10 LCDR2 DNA
ggtaacagcaatcggccctca

SEQ ID NO: 338 - protein, 7 aa, Artificial Sequence
  YU534-D10 LCDR2 PRT
GNSNRPS

SEQ ID NO: 339 - DNA, 33 bp, Artificial Sequence; identical to SEQ ID NO: 259
  YU534-D10 LCDR3 DNA

SEQ ID NO: 340 - protein, 11 aa, Artificial Sequence
  YU534-D10 LCDR3 PRT
QSYDSSLSGYV

SEQ ID NO: 341 - DNA, 333 bp, Artificial Sequence; identical to SEQ ID NO: 261
  YU534-D10 VL DNA

SEQ ID NO: 342 - protein, 111 aa, Artificial Sequence; identical to SEQ ID NO: 262
  YU534-D10 VL PRT

SEQ ID NO: 343 - DNA, 351 bp, Artificial Sequence
  YU534-D10 VH DNA
gaggtgcagctggtgcagtctgggggaggcttggtccagcctggggggtccctgagactctcctgtgcagcctctggagtcaccgtcagtagcaactacatgagctgggtccgccaggctccagggaaggggctggagtgggtctcagttatttatagcggtggtagcacatactacgcagactccgtgaagggcagattcaccatctccagagacaattccaagaacacgctgtatcttcaaatgaacagcctgagagccgaggacacggctgtgtattactgtgcgagagatttggttaactggggaatggactactggggccagggaaccctggtcaccgtgtcctca

SEQ ID NO: 344 - protein, 117 aa, Artificial Sequence
  YU534-D10 VH PRT
EVQLVQSGGGLVQPGGSLRLSCAASGVTVSSNYMSWVRQAPGKGLEWVSVIYSGGSTYYADSVKGRFTISRDNSKNTLYLQMNSLRAEDTAVYYCARDLVNWGMDYWGQGTLVTVSS

SEQ ID NO: 345 - DNA, 1335 bp, Artificial Sequence
  YU534-D10 VH complete DNA
gaggtgcagctggtgcagtctgggggaggcttggtccagcctggggggtccctgagactctcctgtgcagcctctggagtcaccgtcagtagcaactacatgagctgggtccgccaggctccagggaaggggctggagtgggtctcagttatttatagcggtggtagcacatactacgcagactccgtgaagggcagattcaccatctccagagacaattccaagaacacgctgtatcttcaaatgaacagcctgagagccgaggacacggctgtgtattactgtgcgagagatttggttaactggggaatggactactggggccagggaaccctggtcaccgtgtcctcagctagcaccaagggcccatcggtcttccccctggcaccctcctccaagagcacctctgggggcacagcggccctgggctgcctggtcaaggactacttccccgaaccggtgacggtgtcgtggaactcaggcgccctgaccagcggcgtgcacaccttcccggctgtcctacagtcctcaggactctactccctcagcagcgtggtgaccgtgccctccagcagcttgggcacccagacctacatctgcaacgtgaatcacaagcccagcaacaccaaggtggacaagaaagttgagcccaaatcttgtgacaaaactcacacatgcccaccgtgcccagcacctccagtggccggaccgtcagtcttcctcttccccccaaaacccaaggacaccctcatgatctcccggacccctgaggtcacatgcgtggtggtgggcgtgagccacgaagaccctgaggtcaagttcaactggtacgtggacggcgtggaggtgcataatgccaagacaaagccgcgggaggagcagtacaacagcacgtaccgggtggtcagcgtcctcaccgtcctgcaccaggactggctgaatggcaaggagtacaagtgcaaggtctccaacaaacagctcccatcccccatcgagaaaaccatctccaaagccaaagggcagccccgagaaccacaggtgtacaccctgcccccatcccgggatgagctgaccaagaaccaggtcagcctgacctgcctggtcaaaggcttctatcccagcgacatcgccgtggagtgggagagcaatgggcagccggagaacaactacaagaccacgcctcccgtgctggactccgacggctccttcttcctctacagcaagctcaccgtggacaagagcaggtggcagcaggggaacgtcttctcatgctccgtgatgcatgaggctctgcacaaccactacacgcagaaaagcctctccctgtccccgggt

SEQ ID NO: 346 - protein, 445 aa, Artificial Sequence
  YU534-D10 VH complete PRT
EVQLVQSGGGLVQPGGSLRLSCAASGVTVSSNYMSWVRQAPGKGLEWVSVIYSGGSTYYADSVKGRFTISRDNSKNTLYLQMNSLRAEDTAVYYCARDLVNWGMDYWGQGTLVTVSSASTKGPSVFPLAPSSKSTSGGTAALGCLVKDYFPEPVTVSWNSGALTSGVHTFPAVLQSSGLYSLSSVVTVPSSSLGTQTYICNVNHKPSNTKVDKKVEPKSCDKTHTCPPCPAPPVAGPSVFLFPPKPKDTLMISRTPEVTCVVVGVSHEDPEVKFNWYVDGVEVHNAKTKPREEQYNSTYRVVSVLTVLHQDWLNGKEYKCKVSNKQLPSPIEKTISKAKGQPREPQVYTLPPSRDELTKNQVSLTCLVKGFYPSDIAVEWESNGQPENNYKTTPPVLDSDGSFFLYSKLTVDKSRWQQGNVFSCSVMHEALHNHYTQKSLSLSPG

SEQ ID NO: 347 - DNA, 651 bp, Artificial Sequence; identical to SEQ ID NO: 267
  YU534-D10 VL complete DNA

SEQ ID NO: 348 - protein, 217 aa, Artificial Sequence; identical to SEQ ID NO: 268
  YU534-D10 VL complete PRT

SEQ ID NO: 349 - DNA, 15 bp, Artificial Sequence
  YU536-D04 HCDR1 DNA
agcaactacatgagc

SEQ ID NO: 350 - protein, 5 aa, Artificial Sequence
  YU536-D04 HCDR1 PRT
SNYMS

SEQ ID NO: 351 - DNA, 48 bp, Artificial Sequence; identical to SEQ ID NO: 331
  YU536-D04 HCDR2 DNA

SEQ ID NO: 352 - protein, 16 aa, Artificial Sequence
  YU536-D04 HCDR2 PRT
VIYSGGSTYYADSVKG

SEQ ID NO: 353 - DNA, 27 bp, Artificial Sequence
  YU536-D04 HCDR3 DNA
gatcttgttgtaatgggcctggacgtc

SEQ ID NO: 354 - protein, 9 aa, Artificial Sequence
  YU536-D04 HCDR3 PRT
DLVVMGLDV

SEQ ID NO: 355 - DNA, 33 bp, Artificial Sequence; identical to SEQ ID NO: 295
  YU536-D04 LCDR1 DNA

SEQ ID NO: 356 - protein, 11 aa, Artificial Sequence
  YU536-D04 LCDR1 PRT
RASQGISSYLA

SEQ ID NO: 357 - DNA, 21 bp, Artificial Sequence
  YU536-D04 LCDR2 DNA
gctgcatccactttgcaaagt

SEQ ID NO: 358 - protein, 7 aa, Artificial Sequence
  YU536-D04 LCDR2 PRT
AASTLQS

SEQ ID NO: 359 - DNA, 27 bp, Artificial Sequence
  YU536-D04 LCDR3 DNA
caacagcttaatagttacccaatcacc

SEQ ID NO: 360 - protein, 9 aa, Artificial Sequence
  YU536-D04 LCDR3 PRT
QQLNSYPIT

SEQ ID NO: 361 - DNA, 321 bp, Artificial Sequence
  YU536-D04 VL DNA
gacatccagttgacccagtctccatcctccctgtctgcatctgtaggagacagagtcaccatcacttgccgggccagtcagggcattagcagttatttagcctggtatcagcaaaaaccagggaaagcccctaagctcctgatctatgctgcatccactttgcaaagtggggtcccatcaaggttcagcggcagtggatctgggacagatttcactctcaccatcagcagcctgcagcctgaagattttgcaacttattactgtcaacagcttaatagttacccaatcaccttcggccaagggaccaagctggagatcaaa

SEQ ID NO: 362 - protein, 107 aa, Artificial Sequence
  YU536-D04 VL PRT
DIQLTQSPSSLSASVGDRVTITCRASQGISSYLAWYQQKPGKAPKLLIYAASTLQSGVPSRFSGSGSGTDFTLTISSLQPEDFATYYCQQLNSYPITFGQGTKLEIK

SEQ ID NO: 363 - DNA, 351 bp, Artificial Sequence
  YU536-D04 VH DNA
caggtgcagctggtgcagtctgggggaggcttggtccagcctggggggtccctgagactctcctgtgcagcctctggactcaccgtcagtagcaactacatgagctgggtccgccaggctccagggaaggggctggagtgggtctcagttatttatagcggtggtagcacatactacgcagactccgtgaagggcagattcatcatctccagagacaattccaagaacacgctgtatcttcaaatgaacagcctgagagccgaggacacggctgtgtattactgtgcgagagatcttgttgtaatgggcctggacgtctggggcaaagggaccctggtcaccgtgtcctca

SEQ ID NO: 364 - protein, 117 aa, Artificial Sequence
  YU536-D04 VH PRT
QVQLVQSGGGLVQPGGSLRLSCAASGLTVSSNYMSWVRQAPGKGLEWVSVIYSGGSTYYADSVKGRFIISRDNSKNTLYLQMNSLRAEDTAVYYCARDLVVMGLDVWGKGTLVTVSS

SEQ ID NO: 365 - DNA, 1335 bp, Artificial Sequence
  YU536-D04 VH complete DNA
caggtgcagctggtgcagtctgggggaggcttggtccagcctggggggtccctgagactctcctgtgcagcctctggactcaccgtcagtagcaactacatgagctgggtccgccaggctccagggaaggggctggagtgggtctcagttatttatagcggtggtagcacatactacgcagactccgtgaagggcagattcatcatctccagagacaattccaagaacacgctgtatcttcaaatgaacagcctgagagccgaggacacggctgtgtattactgtgcgagagatcttgttgtaatgggcctggacgtctggggcaaagggaccctggtcaccgtgtcctcagctagcaccaagggcccatcggtcttccccctggcaccctcctccaagagcacctctgggggcacagcggccctgggctgcctggtcaaggactacttccccgaaccggtgacggtgtcgtggaactcaggcgccctgaccagcggcgtgcacaccttcccggctgtcctacagtcctcaggactctactccctcagcagcgtggtgaccgtgccctccagcagcttgggcacccagacctacatctgcaacgtgaatcacaagcccagcaacaccaaggtggacaagaaagttgagcccaaatcttgtgacaaaactcacacatgcccaccgtgcccagcacctccagtggccggaccgtcagtcttcctcttccccccaaaacccaaggacaccctcatgatctcccggacccctgaggtcacatgcgtggtggtgggcgtgagccacgaagaccctgaggtcaagttcaactggtacgtggacggcgtggaggtgcataatgccaagacaaagccgcgggaggagcagtacaacagcacgtaccgggtggtcagcgtcctcaccgtcctgcaccaggactggctgaatggcaaggagtacaagtgcaaggtctccaacaaacagctcccatcccccatcgagaaaaccatctccaaagccaaagggcagccccgagaaccacaggtgtacaccctgcccccatcccgggatgagctgaccaagaaccaggtcagcctgacctgcctggtcaaaggcttctatcccagcgacatcgccgtggagtgggagagcaatgggcagccggagaacaactacaagaccacgcctcccgtgctggactccgacggctccttcttcctctacagcaagctcaccgtggacaagagcaggtggcagcaggggaacgtcttctcatgctccgtgatgcatgaggctctgcacaaccactacacgcagaaaagcctctccctgtccccgggt

SEQ ID NO: 366 - protein, 445 aa, Artificial Sequence
  YU536-D04 VH complete PRT
QVQLVQSGGGLVQPGGSLRLSCAASGLTVSSNYMSWVRQAPGKGLEWVSVIYSGGSTYYADSVKGRFIISRDNSKNTLYLQMNSLRAEDTAVYYCARDLVVMGLDVWGKGTLVTVSSASTKGPSVFPLAPSSKSTSGGTAALGCLVKDYFPEPVTVSWNSGALTSGVHTFPAVLQSSGLYSLSSVVTVPSSSLGTQTYICNVNHKPSNTKVDKKVEPKSCDKTHTCPPCPAPPVAGPSVFLFPPKPKDTLMISRTPEVTCVVVGVSHEDPEVKFNWYVDGVEVHNAKTKPREEQYNSTYRVVSVLTVLHQDWLNGKEYKCKVSNKQLPSPIEKTISKAKGQPREPQVYTLPPSRDELTKNQVSLTCLVKGFYPSDIAVEWESNGQPENNYKTTPPVLDSDGSFFLYSKLTVDKSRWQQGNVFSCSVMHEALHNHYTQKSLSLSPG

SEQ ID NO: 367 - DNA, 642 bp, Artificial Sequence
  YU536-D04 VL complete DNA
gacatccagttgacccagtctccatcctccctgtctgcatctgtaggagacagagtcaccatcacttgccgggccagtcagggcattagcagttatttagcctggtatcagcaaaaaccagggaaagcccctaagctcctgatctatgctgcatccactttgcaaagtggggtcccatcaaggttcagcggcagtggatctgggacagatttcactctcaccatcagcagcctgcagcctgaagattttgcaacttattactgtcaacagcttaatagttacccaatcaccttcggccaagggaccaagctggagatcaaacgtacggtggctgcaccatctgtgttcatcttcccgccatctgatgagcagttgaaatctggaactgcctctgttgtgtgcctgctgaataacttctatcccagagaggccaaagtacagtggaaggtggataacgccctccaatcgggtaactcccaggagagtgtcacagagcaggacagcaaggacagcacctacagcctcagcagcaccctgacgctgagcaaagcagactacgagaaacacaaagtctacgcctgcgaagtcacccatcagggcctgagctcgcccgtcacaaagagcttcaacaggggagagtgt

SEQ ID NO: 368 - protein, 214 aa, Artificial Sequence
  YU536-D04 VL complete PRT
DIQLTQSPSSLSASVGDRVTITCRASQGISSYLAWYQQKPGKAPKLLIYAASTLQSGVPSRFSGSGSGTDFTLTISSLQPEDFATYYCQQLNSYPITFGQGTKLEIKRTVAAPSVFIFPPSDEQLKSGTASVVCLLNNFYPREAKVQWKVDNALQSGNSQESVTEQDSKDSTYSLSSTLTLSKADYEKHKVYACEVTHQGLSSPVTKSFNRGEC

SEQ ID NO: 369 - DNA, 15 bp, Artificial Sequence
  YU537-B08 HCDR1 DNA
agcaactacatgagc

SEQ ID NO: 370 - protein, 5 aa, Artificial Sequence
  YU537-B08 HCDR1 PRT
SNYMS

SEQ ID NO: 371 - DNA, 48 bp, Artificial Sequence; identical to SEQ ID NO: 331
  YU537-B08 HCDR2 DNA

SEQ ID NO: 372 - protein, 16 aa, Artificial Sequence
  YU537-B08 HCDR2 PRT
VIYSGGSTYYADSVKG

SEQ ID NO: 373 - DNA, 39 bp, Artificial Sequence
  YU537-B08 HCDR3 DNA
ggggagatacagccatactactactacggtatggacgtc

SEQ ID NO: 374 - protein, 13 aa, Artificial Sequence
  YU537-B08 HCDR3 PRT
GEIQPYYYYGMDV

SEQ ID NO: 375 - DNA, 42 bp, Artificial Sequence
  YU537-B08 LCDR1 DNA
actggaaccagcggtgacgttggtggttataactatgtctcc

SEQ ID NO: 376 - protein, 14 aa, Artificial Sequence
  YU537-B08 LCDR1 PRT
TGTSGDVGGYNYVS

SEQ ID NO: 377 - DNA, 21 bp, Artificial Sequence
  YU537-B08 LCDR2 DNA
gatgtcagtaatcggccctca

SEQ ID NO: 378 - protein, 7 aa, Artificial Sequence
  YU537-B08 LCDR2 PRT
DVSNRPS

SEQ ID NO: 379 - DNA, 33 bp, Artificial Sequence
  YU537-B08 LCDR3 DNA
agctcatatacaagcagcagcactcctgtggta

SEQ ID NO: 380 - protein, 11 aa, Artificial Sequence
  YU537-B08 LCDR3 PRT
SSYTSSSTPVV

SEQ ID NO: 381 - DNA, 333 bp, Artificial Sequence
  YU537-B08 VL DNA
cagtctgccctgactcagcctgcctccgtgtctgggtctcctggacagtcgatcaccatctcctgcactggaaccagcggtgacgttggtggttataactatgtctcctggtaccaacaacacccaggcaaagcccccaaactcatgatttatgatgtcagtaatcggccctcaggggtttctaatcgcttctctggctccaagtctggcaacacggcctccctgaccatctctgggctccaggctgaggacgaggctgattattactgcagctcatatacaagcagcagcactcctgtggtattcggcgaagggaccaagctgaccgtccta

SEQ ID NO: 382 - protein, 111 aa, Artificial Sequence
  YU537-B08 VL PRT
QSALTQPASVSGSPGQSITISCTGTSGDVGGYNYVSWYQQHPGKAPKLMIYDVSNRPSGVSNRFSGSKSGNTASLTISGLQAEDEADYYCSSYTSSSTPVVFGEGTKLTVL

SEQ ID NO: 383 - DNA, 363 bp, Artificial Sequence
  YU537-B08 VH DNA
caggtgcagctggtgcagtctgggggaggcttgatccagcctggggggtccctgagactctcctgtgcagcctctgggttcaccgtcagtagcaactacatgagctgggtccgccaggctccagggaaggggctggagtgggtctcagttatttatagcggtggtagcacatactacgcagactccgtgaagggccgattcaccatctccagagacaattccaagaacacgctgtatcttcaaatgaacagcctgagagccgaggacacggccgtgtattactgcgcgagaggggagatacagccatactactactacggtatggacgtctggggccaagggacaatggtcaccgtgtcttca

SEQ ID NO: 384 - protein, 121 aa, Artificial Sequence
  YU537-B08 VH PRT
QVQLVQSGGGLIQPGGSLRLSCAASGFTVSSNYMSWVRQAPGKGLEWVSVIYSGGSTYYADSVKGRFTISRDNSKNTLYLQMNSLRAEDTAVYYCARGEIQPYYYYGMDVWGQGTMVTVSS

SEQ ID NO: 385 - DNA, 1347 bp, Artificial Sequence
  YU537-B08 VH complete DNA
caggtgcagctggtgcagtctgggggaggcttgatccagcctggggggtccctgagactctcctgtgcagcctctgggttcaccgtcagtagcaactacatgagctgggtccgccaggctccagggaaggggctggagtgggtctcagttatttatagcggtggtagcacatactacgcagactccgtgaagggccgattcaccatctccagagacaattccaagaacacgctgtatcttcaaatgaacagcctgagagccgaggacacggccgtgtattactgcgcgagaggggagatacagccatactactactacggtatggacgtctggggccaagggacaatggtcaccgtgtcttcagctagcaccaagggcccatcggtcttccccctggcaccctcctccaagagcacctctgggggcacagcggccctgggctgcctggtcaaggactacttccccgaaccggtgacggtgtcgtggaactcaggcgccctgaccagcggcgtgcacaccttcccggctgtcctacagtcctcaggactctactccctcagcagcgtggtgaccgtgccctccagcagcttgggcacccagacctacatctgcaacgtgaatcacaagcccagcaacaccaaggtggacaagaaagttgagcccaaatcttgtgacaaaactcacacatgcccaccgtgcccagcacctccagtggccggaccgtcagtcttcctcttccccccaaaacccaaggacaccctcatgatctcccggacccctgaggtcacatgcgtggtggtgggcgtgagccacgaagaccctgaggtcaagttcaactggtacgtggacggcgtggaggtgcataatgccaagacaaagccgcgggaggagcagtacaacagcacgtaccgggtggtcagcgtcctcaccgtcctgcaccaggactggctgaatggcaaggagtacaagtgcaaggtctccaacaaacagctcccatcccccatcgagaaaaccatctccaaagccaaagggcagccccgagaaccacaggtgtacaccctgcccccatcccgggatgagctgaccaagaaccaggtcagcctgacctgcctggtcaaaggcttctatcccagcgacatcgccgtggagtgggagagcaatgggcagccggagaacaactacaagaccacgcctcccgtgctggactccgacggctccttcttcctctacagcaagctcaccgtggacaagagcaggtggcagcaggggaacgtcttctcatgctccgtgatgcatgaggctctgcacaaccactacacgcagaaaagcctctccctgtccccgggt

SEQ ID NO: 386 - protein, 448 aa, Artificial Sequence
  YU537-B08 VH complete PRT
QVQLVQSGGGLIQPGGSLRLSCAASGFTVSSNYMSWVRQAPGKGLEWVSVIYSGGSTYYADSVKGRFTISRDNSKNTLYLQMNSLRAEDTAVYYCARGEIQPYYYYGMDVWGQGTMVTVSSASTKGPSVFPLAPSSKSTSGGTAALGCLVKDYFPEPVTVSWNSGALTSGVHTFPAVLQSSGLYSLSSVVTVPSSSLGTQTYICNVNHKPSNTKVDKKVEPKSCDKTHTCPPCPAPPVAGPSVFLFPPKPKDTLMISRTPEVTCVVVGVSHEDPEVKFNWYVDGVEVHNAKTKPREEQYNSTYRVVSVLTVLHQDWLNGKEYKCKVSNKQLPSPIEKTISKAKGQPREPQVYTLPPSRDELTKNQVSLTCLVKGFYPSDIAVEWESNGQPENNYKTTPPVLDSDGSFFLYSKLTVDKSRWQQGNVFSCSVMHEALHNHYTQKSLSLSP

SEQ ID NO: 387 - DNA, 651 bp, Artificial Sequence
  YU537-B08 VL complete DNA
cagtctgccctgactcagcctgcctccgtgtctgggtctcctggacagtcgatcaccatctcctgcactggaaccagcggtgacgttggtggttataactatgtctcctggtaccaacaacacccaggcaaagcccccaaactcatgatttatgatgtcagtaatcggccctcaggggtttctaatcgcttctctggctccaagtctggcaacacggcctccctgaccatctctgggctccaggctgaggacgaggctgattattactgcagctcatatacaagcagcagcactcctgtggtattcggcgaagggaccaagctgaccgtcctaggtcagcccaaggctgcaccaagtgtcactctgttcccgccctcctctgaggagcttcaagccaacaaggccacactggtgtgtctcataagtgacttctacccgggagccgtgacagtggcctggaaggcagatagcagccccgtcaaggcgggagtggagaccaccacaccctccaaacaaagcaacaacaagtacgcggccagcagctatctgagcctgacgcctgagcagtggaagtcccacagaagctacagctgccaggtcacgcatgaagggagcaccgtggagaagacagtggcccctacagaatgttca

SEQ ID NO: 388 - protein, 217 aa, Artificial Sequence
  YU537-B08 VL complete PRT
QSALTQPASVSGSPGQSITISCTGTSGDVGGYNYVSWYQQHPGKAPKLMIYDVSNRPSGVSNRFSGSKSGNTASLTISGLQAEDEADYYCSSYTSSSTPVVFGEGTKLTVLGQPKAAPSVTLFPPSSEELQANKATLVCLISDFYPGAVTVAWKADSSPVKAGVETTTPSKQSNNKYAASSYLSLTPEQWKSHRSYSCQVTHEGSTVEKTVAPTECS

SEQ ID NO: 389 - DNA, 15 bp, Artificial Sequence
  YU537-H11 HCDR1 DNA
agcaactacatgagc

SEQ ID NO: 390 - protein, 5 aa, Artificial Sequence
  YU537-H11 HCDR1 PRT
SNYMS

SEQ ID NO: 391 - DNA, 48 bp, Artificial Sequence; identical to SEQ ID NO: 331
  YU537-H11 HCDR2 DNA

SEQ ID NO: 392 - protein, 16 aa, Artificial Sequence
  YU537-H11 HCDR2 PRT
VIYSGGSTYYADSVKG

SEQ ID NO: 393 - DNA, 33 bp, Artificial Sequence
  YU537-H11 HCDR3 DNA
ggagaaagtgggagcccgtacggtatggacgtc

SEQ ID NO: 394 - protein, 11 aa, Artificial Sequence
  YU537-H11 HCDR3 PRT
GESGSPYGMDV

SEQ ID NO: 395 - DNA, 39 bp, Artificial Sequence
  YU537-H11 LCDR1 DNA
tctggaagcagctccaacattgggaataattatgtatcc

SEQ ID NO: 396 - protein, 13 aa, Artificial Sequence
  YU537-H11 LCDR1 PRT
SGSSSNIGNNYVS

SEQ ID NO: 397 - DNA, 21 bp, Artificial Sequence
  YU537-H11 LCDR2 DNA
gacactaataagcgaccctcg

SEQ ID NO: 398 - protein, 7 aa, Artificial Sequence
  YU537-H11 LCDR2 PRT
DTNKRPS

SEQ ID NO: 399 - DNA, 33 bp, Artificial Sequence
  YU537-H11 LCDR3 DNA
gcaacatgggatagcagcctgagtgttggggtg

SEQ ID NO: 400 - protein, 11 aa, Artificial Sequence
  YU537-H11 LCDR3 PRT
ATWDSSLSVGV

SEQ ID NO: 401 - DNA, 330 bp, Artificial Sequence
  YU537-H11 VL DNA
cagtctgtgctgacgcagccgccctcagtgtctgcggccccaggacagaaggtcaccatctcctgctctggaagcagctccaacattgggaataattatgtatcctggtaccagcagctcccaggaacagcccccaaactcctcatttatgacactaataagcgaccctcggggattcctgaccgattttctggctccaagtctggcacgtcagccaccctgggcatcaccggactccagactggggacgaggccgattattactgcgcaacatgggatagcagcctgagtgttggggtgttcggcggagggaccaagctgaccgtccta

SEQ ID NO: 402 - protein, 110 aa, Artificial Sequence
  YU537-H11 VL PRT
QSVLTQPPSVSAAPGQKVTISCSGSSSNIGNNYVSWYQQLPGTAPKLLIYDTNKRPSGIPDRFSGSKSGTSATLGITGLQTGDEADYYCATWDSSLSVGVFGGGTKLTVL

SEQ ID NO: 403 - DNA, 357 bp, Artificial Sequence
  YU537-H11 VH DNA
gaggtgcagctgttggagtctggaggaggcttgatccagcctggggggtccctgagactctcctgtgcagcctctgggctcaccgtcagtagcaactacatgagctgggtccgccaggctccagggaaggggctggagtgggtctcagttatttatagcggtggtagcacatactacgcagactccgtgaagggccgattcaccatctccagagacaattccaagaacgcgctgtatcttcaaatgaacagcctgagagccgaggacacggccgtgtattactgtgcgagaggagaaagtgggagcccgtacggtatggacgtctggggccaagggaccctggtcaccgtgtcctca

SEQ ID NO: 404 - protein, 119 aa, Artificial Sequence
  YU537-H11 VH PRT
EVQLLESGGGLIQPGGSLRLSCAASGLTVSSNYMSWVRQAPGKGLEWVSVIYSGGSTYYADSVKGRFTISRDNSKNALYLQMNSLRAEDTAVYYCARGESGSPYGMDVWGQGTLVTVSS

SEQ ID NO: 405 - DNA, 1341 bp, Artificial Sequence
  YU537-H11 VH complete DNA
gaggtgcagctgttggagtctggaggaggcttgatccagcctggggggtccctgagactctcctgtgcagcctctgggctcaccgtcagtagcaactacatgagctgggtccgccaggctccagggaaggggctggagtgggtctcagttatttatagcggtggtagcacatactacgcagactccgtgaagggccgattcaccatctccagagacaattccaagaacgcgctgtatcttcaaatgaacagcctgagagccgaggacacggccgtgtattactgtgcgagaggagaaagtgggagcccgtacggtatggacgtctggggccaagggaccctggtcaccgtgtcctcagctagcaccaagggcccatcggtcttccccctggcaccctcctccaagagcacctctgggggcacagcggccctgggctgcctggtcaaggactacttccccgaaccggtgacggtgtcgtggaactcaggcgccctgaccagcggcgtgcacaccttcccggctgtcctacagtcctcaggactctactccctcagcagcgtggtgaccgtgccctccagcagcttgggcacccagacctacatctgcaacgtgaatcacaagcccagcaacaccaaggtggacaagaaagttgagcccaaatcttgtgacaaaactcacacatgcccaccgtgcccagcacctccagtggccggaccgtcagtcttcctcttccccccaaaacccaaggacaccctcatgatctcccggacccctgaggtcacatgcgtggtggtgggcgtgagccacgaagaccctgaggtcaagttcaactggtacgtggacggcgtggaggtgcataatgccaagacaaagccgcgggaggagcagtacaacagcacgtaccgggtggtcagcgtcctcaccgtcctgcaccaggactggctgaatggcaaggagtacaagtgcaaggtctccaacaaacagctcccatcccccatcgagaaaaccatctccaaagccaaagggcagccccgagaaccacaggtgtacaccctgcccccatcccgggatgagctgaccaagaaccaggtcagcctgacctgcctggtcaaaggcttctatcccagcgacatcgccgtggagtgggagagcaatgggcagccggagaacaactacaagaccacgcctcccgtgctggactccgacggctccttcttcctctacagcaagctcaccgtggacaagagcaggtggcagcaggggaacgtcttctcatgctccgtgatgcatgaggctctgcacaaccactacacgcagaaaagcctctccctgtccccgggt

SEQ ID NO: 406 - protein, 447 aa, Artificial Sequence
  YU537-H11 VH complete PRT
EVQLLESGGGLIQPGGSLRLSCAASGLTVSSNYMSWVRQAPGKGLEWVSVIYSGGSTYYADSVKGRFTISRDNSKNALYLQMNSLRAEDTAVYYCARGESGSPYGMDVWGQGTLVTVSSASTKGPSVFPLAPSSKSTSGGTAALGCLVKDYFPEPVTVSWNSGALTSGVHTFPAVLQSSGLYSLSSVVTVPSSSLGTQTYICNVNHKPSNTKVDKKVEPKSCDKTHTCPPCPAPPVAGPSVFLFPPKPKDTLMISRTPEVTCVVVGVSHEDPEVKFNWYVDGVEVHNAKTKPREEQYNSTYRVVSVLTVLHQDWLNGKEYKCKVSNKQLPSPIEKTISKAKGQPREPQVYTLPPSRDELTKNQVSLTCLVKGFYPSDIAVEWESNGQPENNYKTTPPVLDSDGSFFLYSKLTVDKSRWQQGNVFSCSVMHEALHNHYTQKSLSLSPG

SEQ ID NO: 407 - DNA, 648 bp, Artificial Sequence
  YU537-H11 VL complete DNA
cagtctgtgctgacgcagccgccctcagtgtctgcggccccaggacagaaggtcaccatctcctgctctggaagcagctccaacattgggaataattatgtatcctggtaccagcagctcccaggaacagcccccaaactcctcatttatgacactaataagcgaccctcggggattcctgaccgattttctggctccaagtctggcacgtcagccaccctgggcatcaccggactccagactggggacgaggccgattattactgcgcaacatgggatagcagcctgagtgttggggtgttcggcggagggaccaagctgaccgtcctaggtcagcccaaggctgcaccaagtgtcactctgttcccgccctcctctgaggagcttcaagccaacaaggccacactggtgtgtctcataagtgacttctacccgggagccgtgacagtggcctggaaggcagatagcagccccgtcaaggcgggagtggagaccaccacaccctccaaacaaagcaacaacaagtacgcggccagcagctatctgagcctgacgcctgagcagtggaagtcccacagaagctacagctgccaggtcacgcatgaagggagcaccgtggagaagacagtggcccctacagaatgttca

SEQ ID NO: 408 - protein, 216 aa, Artificial Sequence
  YU537-H11 VL complete PRT
QSVLTQPPSVSAAPGQKVTISCSGSSSNIGNNYVSWYQQLPGTAPKLLIYDTNKRPSGIPDRFSGSKSGTSATLGITGLQTGDEADYYCATWDSSLSVGVFGGGTKLTVLGQPKAAPSVTLFPPSSEELQANKATLVCLISDFYPGAVTVAWKADSSPVKAGVETTTPSKQSNNKYAASSYLSLTPEQWKSHRSYSCQVTHEGSTVEKTVAPTECS

SEQ ID NO: 409 - DNA, 15 bp, Artificial Sequence
  YU534-A11 HCDR1 DNA
agcaactacatgagc

SEQ ID NO: 410 - protein, 5 aa, Artificial Sequence
  YU534-A11 HCDR1 PRT
SNYMS

SEQ ID NO: 411 - DNA, 48 bp, Artificial Sequence; identical to SEQ ID NO: 331
  YU534-A11 HCDR2 DNA

SEQ ID NO: 412 - protein, 16 aa, Artificial Sequence
  YU534-A11 HCDR2 PRT
VIYSGGSTYYADSVKG

SEQ ID NO: 413 - DNA, 60 bp, Artificial Sequence
  YU534-A11 HCDR3 DNA
ggcaagagtattactatggttcggggagtgccaactggggtgcctccctacatggacgtc

SEQ ID NO: 414 - protein, 20 aa, Artificial Sequence
  YU534-A11 HCDR3 PRT
GKSITMVRGVPTGVPPYMDV

SEQ ID NO: 415 - DNA, 39 bp, Artificial Sequence; identical to SEQ ID NO: 155
  YU534-A11 LCDR1 DNA

SEQ ID NO: 416 - protein, 13 aa, Artificial Sequence
  YU534-A11 LCDR1 PRT
SGSSSNIGNNAVN

SEQ ID NO: 417 - DNA, 21 bp, Artificial Sequence
  YU534-A11 LCDR2 DNA
tatgatgatctgctgccctca

SEQ ID NO: 418 - protein, 7 aa, Artificial Sequence
  YU534-A11 LCDR2 PRT
YDDLLPS

SEQ ID NO: 419 - DNA, 33 bp, Artificial Sequence
  YU534-A11 LCDR3 DNA
gcagcatgggatgacagcctgaatggtgtggta

SEQ ID NO: 420 - protein, 11 aa, Artificial Sequence
  YU534-A11 LCDR3 PRT
AAWDDSLNGVV

SEQ ID NO: 421 - DNA, 330 bp, Artificial Sequence
  YU534-A11 VL DNA
cagtctgtgctgactcagccaccctcggtgtctgaagcccccaggcagagggtcaccatctcctgttctggaagcagctccaacatcggaaataatgctgtaaactggtaccagcagctcccaggaaaggctcccaaactcctcatctattatgatgatctgctgccctcaggggtctctgaccgattctctggctccaagtctggcacctcagcctccctggccatcagtgggctccagtctgaggatgaggctgattattactgtgcagcatgggatgacagcctgaatggtgtggtattcggcggagggaccaagctgaccgtccta

SEQ ID NO: 422 - protein, 110 aa, Artificial Sequence
  YU534-A11 VL PRT
QSVLTQPPSVSEAPRQRVTISCSGSSSNIGNNAVNWYQQLPGKAPKLLIYYDDLLPSGVSDRFSGSKSGTSASLAISGLQSEDEADYYCAAWDDSLNGVVFGGGTKLTVL

SEQ ID NO: 423 - DNA, 384 bp, Artificial Sequence
  YU534-A11 VH DNA
gaggtgcagctggtgcagtctgggggaggcttggtccagcctggggggtccctgagactctcctgtgcagcctctggattcaccgtcagtagcaactacatgagctgggtccgccaggctccagggaaggggctggagtgggtctcagttatttatagcggtggtagcacatactacgcagactccgtgaagggcagattcaccatctccagagacaattccaagaacacgctgtatcttcaaatgaacagcctgagagccgaggacacggctgtgtattactgtgcgagaggcaagagtattactatggttcggggagtgccaactggggtgcctccctacatggacgtctggggcaaagggaccacggtcaccgtgtcctca

SEQ ID NO: 424 - protein, 128 aa, Artificial Sequence
  YU534-A11 VH PRT
EVQLVQSGGGLVQPGGSLRLSCAASGFTVSSNYMSWVRQAPGKGLEWVSVIYSGGSTYYADSVKGRFTISRDNSKNTLYLQMNSLRAEDTAVYYCARGKSITMVRGVPTGVPPYMDVWGKGTTVTVSS

SEQ ID NO: 425 - DNA, 1368 bp, Artificial Sequence
  YU534-A11 VH complete DNA
gaggtgcagctggtgcagtctgggggaggcttggtccagcctggggggtccctgagactctcctgtgcagcctctggattcaccgtcagtagcaactacatgagctgggtccgccaggctccagggaaggggctggagtgggtctcagttatttatagcggtggtagcacatactacgcagactccgtgaagggcagattcaccatctccagagacaattccaagaacacgctgtatcttcaaatgaacagcctgagagccgaggacacggctgtgtattactgtgcgagaggcaagagtattactatggttcggggagtgccaactggggtgcctccctacatggacgtctggggcaaagggaccacggtcaccgtgtcctcagctagcaccaagggcccatcggtcttccccctggcaccctcctccaagagcacctctgggggcacagcggccctgggctgcctggtcaaggactacttccccgaaccggtgacggtgtcgtggaactcaggcgccctgaccagcggcgtgcacaccttcccggctgtcctacagtcctcaggactctactccctcagcagcgtggtgaccgtgccctccagcagcttgggcacccagacctacatctgcaacgtgaatcacaagcccagcaacaccaaggtggacaagaaagttgagcccaaatcttgtgacaaaactcacacatgcccaccgtgcccagcacctccagtggccggaccgtcagtcttcctcttccccccaaaacccaaggacaccctcatgatctcccggacccctgaggtcacatgcgtggtggtgggcgtgagccacgaagaccctgaggtcaagttcaactggtacgtggacggcgtggaggtgcataatgccaagacaaagccgcgggaggagcagtacaacagcacgtaccgggtggtcagcgtcctcaccgtcctgcaccaggactggctgaatggcaaggagtacaagtgcaaggtctccaacaaacagctcccatcccccatcgagaaaaccatctccaaagccaaagggcagccccgagaaccacaggtgtacaccctgcccccatcccgggatgagctgaccaagaaccaggtcagcctgacctgcctggtcaaaggcttctatcccagcgacatcgccgtggagtgggagagcaatgggcagccggagaacaactacaagaccacgcctcccgtgctggactccgacggctccttcttcctctacagcaagctcaccgtggacaagagcaggtggcagcaggggaacgtcttctcatgctccgtgatgcatgaggctctgcacaaccactacacgcagaaaagcctctccctgtccccgggt

SEQ ID NO: 426 - protein, 456 aa, Artificial Sequence
  YU534-A11 VH complete PRT
EVQLVQSGGGLVQPGGSLRLSCAASGFTVSSNYMSWVRQAPGKGLEWVSVIYSGGSTYYADSVKGRFTISRDNSKNTLYLQMNSLRAEDTAVYYCARGKSITMVRGVPTGVPPYMDVWGKGTTVTVSSASTKGPSVFPLAPSSKSTSGGTAALGCLVKDYFPEPVTVSWNSGALTSGVHTFPAVLQSSGLYSLSSVVTVPSSSLGTQTYICNVNHKPSNTKVDKKVEPKSCDKTHTCPPCPAPPVAGPSVFLFPPKPKDTLMISRTPEVTCVVVGVSHEDPEVKFNWYVDGVEVHNAKTKPREEQYNSTYRVVSVLTVLHQDWLNGKEYKCKVSNKQLPSPIEKTISKAKGQPREPQVYTLPPSRDELTKNQVSLTCLVKGFYPSDIAVEWESNGQPENNYKTTPPVLDSDGSFFLYSKLTVDKSRWQQGNVFSCSVMHEALHNHYTQKSLSLSPG

SEQ ID NO: 427 - DNA, 648 bp, Artificial Sequence
  YU534-A11 VL complete DNA
cagtctgtgctgactcagccaccctcggtgtctgaagcccccaggcagagggtcaccatctcctgttctggaagcagctccaacatcggaaataatgctgtaaactggtaccagcagctcccaggaaaggctcccaaactcctcatctattatgatgatctgctgccctcaggggtctctgaccgattctctggctccaagtctggcacctcagcctccctggccatcagtgggctccagtctgaggatgaggctgattattactgtgcagcatgggatgacagcctgaatggtgtggtattcggcggagggaccaagctgaccgtcctaggtcagcccaaggctgcaccaagtgtcactctgttcccgccctcctctgaggagcttcaagccaacaaggccacactggtgtgtctcataagtgacttctacccgggagccgtgacagtggcctggaaggcagatagcagccccgtcaaggcgggagtggagaccaccacaccctccaaacaaagcaacaacaagtacgcggccagcagctatctgagcctgacgcctgagcagtggaagtcccacagaagctacagctgccaggtcacgcatgaagggagcaccgtggagaagacagtggcccctacagaatgttca

SEQ ID NO: 428 - protein, 216 aa, Artificial Sequence
  YU534-A11 VL complete PRT
QSVLTQPPSVSEAPRQRVTISCSGSSSNIGNNAVNWYQQLPGKAPKLLIYYDDLLPSGVSDRFSGSKSGTSASLAISGLQSEDEADYYCAAWDDSLNGVVFGGGTKLTVLGQPKAAPSVTLFPPSSEELQANKATLVCLISDFYPGAVTVAWKADSSPVKAGVETTTPSKQSNNKYAASSYLSLTPEQWKSHRSYSCQVTHEGSTVEKTVAPTECS

SEQ ID NO: 429 - DNA, 15 bp, Artificial Sequence
  YU534-G06 HCDR1 DNA
agttatgctatcacc

SEQ ID NO: 430 - protein, 5 aa, Artificial Sequence
  YU534-G06 HCDR1 PRT
SYAIT

SEQ ID NO: 431 - DNA, 51 bp, Artificial Sequence
  YU534-G06 HCDR2 DNA
gggatcatccctatctttggtacaccaaactacgcacagaagttccaggac

SEQ ID NO: 432 - protein, 16 aa, Artificial Sequence
  YU534-G06 HCDR2 PRT
GIIPIFGTPNYAQKFQ

SEQ ID NO: 433 - DNA, 51 bp, Artificial Sequence
  YU534-G06 HCDR3 DNA
gataaagggttcggggaggggaaaggttaccactactacggtctggacgtc

SEQ ID NO: 434 - protein, 16 aa, Artificial Sequence
  YU534-G06 HCDR3 PRT
DKGFGEGKGYHYYGLD

SEQ ID NO: 435 - DNA, 42 bp, Artificial Sequence
  YU534-G06 LCDR1 DNA
actggaaccagcagtgacgttggtagttataactttgtctcc

SEQ ID NO: 436 - protein, 14 aa, Artificial Sequence
  YU534-G06 LCDR1 PRT
TGTSSDVGSYNFVS

SEQ ID NO: 437 - DNA, 21 bp, Artificial Sequence
  YU534-G06 LCDR2 DNA
gaggtcaataatcggccctca

SEQ ID NO: 438 - protein, 7 aa, Artificial Sequence
  YU534-G06 LCDR2 PRT
EVNNRPS

SEQ ID NO: 439 - DNA, 27 bp, Artificial Sequence
  YU534-G06 LCDR3 DNA
agctcatatacaagcagcagcgtggta

SEQ ID NO: 440 - protein, 9 aa, Artificial Sequence
  YU534-G06 LCDR3 PRT
SSYTSSSVV

SEQ ID NO: 441 - DNA, 327 bp, Artificial Sequence
  YU534-G06 VL DNA
cagtctgccctgactcagcctgcctccgtgtctgggtctcctggacagtcgatcaccatctcctgcactggaaccagcagtgacgttggtagttataactttgtctcctggtaccaacagcacccaggcaaagcccccaaactcatgatttatgaggtcaataatcggccctcaggggtttcttatcgcttctctggctccaagtctggcaacacggcctccctgaccatctctgggctccaggctgaggacgaggctgattattactgcagctcatatacaagcagcagcgtggtattcggcggagggaccaaggtcaccgtccta

SEQ ID NO: 442 - protein, 109 aa, Artificial Sequence
  YU534-G06 VL PRT
QSALTQPASVSGSPGQSITISCTGTSSDVGSYNFVSWYQQHPGKAPKLMIYEVNNRPSGVSYRFSGSKSGNTASLTISGLQAEDEADYYCSSYTSSSVVFGGGTKVTVL

SEQ ID NO: 443 - DNA, 378 bp, Artificial Sequence
  YU534-G06 VH DNA
caggtgcagctggtgcagtctggggctgaggtgaagaagcctgggtcctcggtgaaggtctcctgcaaggcttctggaggcaccttcaccagttatgctatcacctgggtgcgacaggcccctggacaagggcttgagtggatgggagggatcatccctatctttggtacaccaaactacgcacagaagttccaggacagagtcacgattaccgcagacaaatccacgagcacagcctacatggagctgagcagcctgagatctgaggacacggccgtgtattactgtgcgaatgataaagggttcggggaggggaaaggttaccactactacggtctggacgtctggggccaagggaccctggtcaccgtgtcctca

SEQ ID NO: 444 - protein, 126 aa, Artificial Sequence
  YU534-G06 VH PRT
QVQLVQSGAEVKKPGSSVKVSCKASGGTFTSYAITWVRQAPGQGLEWMGGIIPIFGTPNYAQKFQDRVTITADKSTSTAYMELSSLRSEDTAVYYCANDKGFGEGKGYHYYGLDVWGQGTLVTVSS

SEQ ID NO: 445 - DNA, 1362 bp, Artificial Sequence
  YU534-G06 VH complete DNA
caggtgcagctggtgcagtctggggctgaggtgaagaagcctgggtcctcggtgaaggtctcctgcaaggcttctggaggcaccttcaccagttatgctatcacctgggtgcgacaggcccctggacaagggcttgagtggatgggagggatcatccctatctttggtacaccaaactacgcacagaagttccaggacagagtcacgattaccgcagacaaatccacgagcacagcctacatggagctgagcagcctgagatctgaggacacggccgtgtattactgtgcgaatgataaagggttcggggaggggaaaggttaccactactacggtctggacgtctggggccaagggaccctggtcaccgtgtcctcagctagcaccaagggcccatcggtcttccccctggcaccctcctccaagagcacctctgggggcacagcggccctgggctgcctggtcaaggactacttccccgaaccggtgacggtgtcgtggaactcaggcgccctgaccagcggcgtgcacaccttcccggctgtcctacagtcctcaggactctactccctcagcagcgtggtgaccgtgccctccagcagcttgggcacccagacctacatctgcaacgtgaatcacaagcccagcaacaccaaggtggacaagaaagttgagcccaaatcttgtgacaaaactcacacatgcccaccgtgcccagcacctccagtggccggaccgtcagtcttcctcttccccccaaaacccaaggacaccctcatgatctcccggacccctgaggtcacatgcgtggtggtgggcgtgagccacgaagaccctgaggtcaagttcaactggtacgtggacggcgtggaggtgcataatgccaagacaaagccgcgggaggagcagtacaacagcacgtaccgggtggtcagcgtcctcaccgtcctgcaccaggactggctgaatggcaaggagtacaagtgcaaggtctccaacaaacagctcccatcccccatcgagaaaaccatctccaaagccaaagggcagccccgagaaccacaggtgtacaccctgcccccatcccgggatgagctgaccaagaaccaggtcagcctgacctgcctggtcaaaggcttctatcccagcgacatcgccgtggagtgggagagcaatgggcagccggagaacaactacaagaccacgcctcccgtgctggactccgacggctccttcttcctctacagcaagctcaccgtggacaagagcaggtggcagcaggggaacgtcttctcatgctccgtgatgcatgaggctctgcacaaccactacacgcagaaaagcctctccctgtccccgggt

SEQ ID NO: 446 - protein, 454 aa, Artificial Sequence
  YU534-G06 VH complete PRT
QVQLVQSGAEVKKPGSSVKVSCKASGGTFTSYAITWVRQAPGQGLEWMGGIIPIFGTPNYAQKFQDRVTITADKSTSTAYMELSSLRSEDTAVYYCANDKGFGEGKGYHYYGLDVWGQGTLVTVSSASTKGPSVFPLAPSSKSTSGGTAALGCLVKDYFPEPVTVSWNSGALTSGVHTFPAVLQSSGLYSLSSVVTVPSSSLGTQTYICNVNHKPSNTKVDKKVEPKSCDKTHTCPPCPAPPVAGPSVFLFPPKPKDTLMISRTPEVTCVVVGVSHEDPEVKFNWYVDGVEVHNAKTKPREEQYNSTYRVVSVLTVLHQDWLNGKEYKCKVSNKQLPSPIEKTISKAKGQPREPQVYTLPPSRDELTKNQVSLTCLVKGFYPSDIAVEWESNGQPENNYKTTPPVLDSDGSFFLYSKLTVDKSRWQQGNVFSCSVMHEALHNHYTQKSLSLSPG

SEQ ID NO: 447 - DNA, 645 bp, Artificial Sequence
  YU534-G06 VL complete DNA
cagtctgccctgactcagcctgcctccgtgtctgggtctcctggacagtcgatcaccatctcctgcactggaaccagcagtgacgttggtagttataactttgtctcctggtaccaacagcacccaggcaaagcccccaaactcatgatttatgaggtcaataatcggccctcaggggtttcttatcgcttctctggctccaagtctggcaacacggcctccctgaccatctctgggctccaggctgaggacgaggctgattattactgcagctcatatacaagcagcagcgtggtattcggcggagggaccaaggtcaccgtcctaggtcagcccaaggctgcaccaagtgtcactctgttcccgccctcctctgaggagcttcaagccaacaaggccacactggtgtgtctcataagtgacttctacccgggagccgtgacagtggcctggaaggcagatagcagccccgtcaaggcgggagtggagaccaccacaccctccaaacaaagcaacaacaagtacgcggccagcagctatctgagcctgacgcctgagcagtggaagtcccacagaagctacagctgccaggtcacgcatgaagggagcaccgtggagaagacagtggcccctacagaatgttca

SEQ ID NO: 448 - protein, 215 aa, Artificial Sequence
  YU534-G06 VL complete PRT
QSALTQPASVSGSPGQSITISCTGTSSDVGSYNFVSWYQQHPGKAPKLMIYEVNNRPSGVSYRFSGSKSGNTASLTISGLQAEDEADYYCSSYTSSSVVFGGGTKVTVLGQPKAAPSVTLFPPSSEELQANKATLVCLISDFYPGAVTVAWKADSSPVKAGVETTTPSKQSNNKYAASSYLSLTPEQWKSHRSYSCQVTHEGSTVEKTVAPTECS

SEQ ID NO: 449 - DNA, 15 bp, Artificial Sequence
  YU534-H02 HCDR1 DNA
agctatgctctcacc

SEQ ID NO: 450 - protein, 5 aa, Artificial Sequence
  YU534-H02 HCDR1 PRT
SYALT

SEQ ID NO: 451 - DNA, 51 bp, Artificial Sequence; identical to SEQ ID NO: 431
  YU534-H02 HCDR2 DNA

SEQ ID NO: 452 - protein, 16 aa, Artificial Sequence
  YU534-H02 HCDR2 PRT
GIIPIFGTPNYAQKFQ

SEQ ID NO: 453 - DNA, 51 bp, Artificial Sequence
  YU534-H02 HCDR3 DNA
gataaagggttcggggaggggaaaggttaccacttctacggtctggacgtc

SEQ ID NO: 454 - protein, 16 aa, Artificial Sequence
  YU534-H02 HCDR3 PRT
DKGFGEGKGYHFYGLD

SEQ ID NO: 455 - DNA, 42 bp, Artificial Sequence
  YU534-H02 LCDR1 DNA
actggaaccagcagtgacgttggtggttataattttgtctcc

SEQ ID NO: 456 - protein, 14 aa, Artificial Sequence
  YU534-H02 LCDR1 PRT
TGTSSDVGGYNFVS

SEQ ID NO: 457 - DNA, 21 bp, Artificial Sequence
  YU534-H02 LCDR2 DNA
gaggtcagtaatcggccctca

SEQ ID NO: 458 - protein, 7 aa, Artificial Sequence
  YU534-H02 LCDR2 PRT
EVSNRPS

SEQ ID NO: 459 - DNA, 30 bp, Artificial Sequence
  YU534-H02 LCDR3 DNA
agctcatatacaagcagcggcagtctcata

SEQ ID NO: 460 - protein, 10 aa, Artificial Sequence
  YU534-H02 LCDR3 PRT
SSYTSSGSLI

SEQ ID NO: 461 - DNA, 330 bp, Artificial Sequence
  YU534-H02 VL DNA
cagtctgccctgactcagcctgcctccgtgtctgggtctcctggacagtcgatcaccatctcctgtactggaaccagcagtgacgttggtggttataattttgtctcctggtatcaacaatacccaggcaaagcccccaaactcatgatttatgaggtcagtaatcggccctcaggggtttctgatcgcttctcgggctccaagtctggcgacacggcctccctgaccatctctgggctccaggctgaggacgaggctgattattactgcagctcatatacaagcagcggcagtctcatattcggcggagggaccaagctgaccgtccta

SEQ ID NO: 462 - protein, 110 aa, Artificial Sequence
  YU534-H02 VL PRT
QSALTQPASVSGSPGQSITISCTGTSSDVGGYNFVSWYQQYPGKAPKLMIYEVSNRPSGVSDRFSGSKSGDTASLTISGLQAEDEADYYCSSYTSSGSLIFGGGTKLTVL

SEQ ID NO: 463 - DNA, 378 bp, Artificial Sequence
  YU534-H02 VH DNA
gaggtgcagctggtggagtctggggctgaggtgaagaagcctgggtcctcggtgaaggtctcctgcaaggcttctggaggcaccttcagcagctatgctctcacctgggtgcgacaggcccctggacaaggacttgagtggatgggagggatcatccctatctttggtacaccaaactacgcacagaagttccaggacagagtcacgattaccgcagacaaatccacgagcacagcctacatggagctgagcagcctgagatctgaagacacggccgtgtattactgtgcgaatgataaagggttcggggaggggaaaggttaccacttctacggtctggacgtctggggccaagggaccacggtcaccgtgtcctca

SEQ ID NO: 464 - protein, 126 aa, Artificial Sequence
  YU534-H02 VH PRT
EVQLVESGAEVKKPGSSVKVSCKASGGTFSSYALTWVRQAPGQGLEWMGGIIPIFGTPNYAQKFQDRVTITADKSTSTAYMELSSLRSEDTAVYYCANDKGFGEGKGYHFYGLDVWGQGTTVTVSS

SEQ ID NO: 465 - DNA, 1362 bp, Artificial Sequence
  YU534-H02 VH complete DNA
gaggtgcagctggtggagtctggggctgaggtgaagaagcctgggtcctcggtgaaggtctcctgcaaggcttctggaggcaccttcagcagctatgctctcacctgggtgcgacaggcccctggacaaggacttgagtggatgggagggatcatccctatctttggtacaccaaactacgcacagaagttccaggacagagtcacgattaccgcagacaaatccacgagcacagcctacatggagctgagcagcctgagatctgaagacacggccgtgtattactgtgcgaatgataaagggttcggggaggggaaaggttaccacttctacggtctggacgtctggggccaagggaccacggtcaccgtgtcctcagctagcaccaagggcccatcggtcttccccctggcaccctcctccaagagcacctctgggggcacagcggccctgggctgcctggtcaaggactacttccccgaaccggtgacggtgtcgtggaactcaggcgccctgaccagcggcgtgcacaccttcccggctgtcctacagtcctcaggactctactccctcagcagcgtggtgaccgtgccctccagcagcttgggcacccagacctacatctgcaacgtgaatcacaagcccagcaacaccaaggtggacaagaaagttgagcccaaatcttgtgacaaaactcacacatgcccaccgtgcccagcacctccagtggccggaccgtcagtcttcctcttccccccaaaacccaaggacaccctcatgatctcccggacccctgaggtcacatgcgtggtggtgggcgtgagccacgaagaccctgaggtcaagttcaactggtacgtggacggcgtggaggtgcataatgccaagacaaagccgcgggaggagcagtacaacagcacgtaccgggtggtcagcgtcctcaccgtcctgcaccaggactggctgaatggcaaggagtacaagtgcaaggtctccaacaaacagctcccatcccccatcgagaaaaccatctccaaagccaaagggcagccccgagaaccacaggtgtacaccctgcccccatcccgggatgagctgaccaagaaccaggtcagcctgacctgcctggtcaaaggcttctatcccagcgacatcgccgtggagtgggagagcaatgggcagccggagaacaactacaagaccacgcctcccgtgctggactccgacggctccttcttcctctacagcaagctcaccgtggacaagagcaggtggcagcaggggaacgtcttctcatgctccgtgatgcatgaggctctgcacaaccactacacgcagaaaagcctctccctgtccccgggt

SEQ ID NO: 466 - protein, 454 aa, Artificial Sequence
  YU534-H02 VH complete PRT
EVQLVESGAEVKKPGSSVKVSCKASGGTFSSYALTWVRQAPGQGLEWMGGIIPIFGTPNYAQKFQDRVTITADKSTSTAYMELSSLRSEDTAVYYCANDKGFGEGKGYHFYGLDVWGQGTTVTVSSASTKGPSVFPLAPSSKSTSGGTAALGCLVKDYFPEPVTVSWNSGALTSGVHTFPAVLQSSGLYSLSSVVTVPSSSLGTQTYICNVNHKPSNTKVDKKVEPKSCDKTHTCPPCPAPPVAGPSVFLFPPKPKDTLMISRTPEVTCVVVGVSHEDPEVKFNWYVDGVEVHNAKTKPREEQYNSTYRVVSVLTVLHQDWLNGKEYKCKVSNKQLPSPIEKTISKAKGQPREPQVYTLPPSRDELTKNQVSLTCLVKGFYPSDIAVEWESNGQPENNYKTTPPVLDSDGSFFLYSKLTVDKSRWQQGNVFSCSVMHEALHNHYTQKSLSLSPG

SEQ ID NO: 467 - DNA, 648 bp, Artificial Sequence
  YU534-H02 VL complete DNA
cagtctgccctgactcagcctgcctccgtgtctgggtctcctggacagtcgatcaccatctcctgtactggaaccagcagtgacgttggtggttataattttgtctcctggtatcaacaatacccaggcaaagcccccaaactcatgatttatgaggtcagtaatcggccctcaggggtttctgatcgcttctcgggctccaagtctggcgacacggcctccctgaccatctctgggctccaggctgaggacgaggctgattattactgcagctcatatacaagcagcggcagtctcatattcggcggagggaccaagctgaccgtcctaggtcagcccaaggctgcaccaagtgtcactctgttcccgccctcctctgaggagcttcaagccaacaaggccacactggtgtgtctcataagtgacttctacccgggagccgtgacagtggcctggaaggcagatagcagccccgtcaaggcgggagtggagaccaccacaccctccaaacaaagcaacaacaagtacgcggccagcagctatctgagcctgacgcctgagcagtggaagtcccacagaagctacagctgccaggtcacgcatgaagggagcaccgtggagaagacagtggcccctacagaatgttca

SEQ ID NO: 468 - protein, 216 aa, Artificial Sequence
  YU534-H02 VL complete PRT
QSALTQPASVSGSPGQSITISCTGTSSDVGGYNFVSWYQQYPGKAPKLMIYEVSNRPSGVSDRFSGSKSGDTASLTISGLQAEDEADYYCSSYTSSGSLIFGGGTKLTVLGQPKAAPSVTLFPPSSEELQANKATLVCLISDFYPGAVTVAWKADSSPVKAGVETTTPSKQSNNKYAASSYLSLTPEQWKSHRSYSCQVTHEGSTVEKTVAPTECS

SEQ ID NO: 469 - DNA, 15 bp, Artificial Sequence
  YU534-F06 HCDR1 DNA
agttatgctatcacc

SEQ ID NO: 470 - protein, 5 aa, Artificial Sequence
  YU534-F06 HCDR1 PRT
SYAIT

SEQ ID NO: 471 - DNA, 51 bp, Artificial Sequence; identical to SEQ ID NO: 431
  YU534-F06 HCDR2 DNA

SEQ ID NO: 472 - protein, 16 aa, Artificial Sequence
  YU534-F06 HCDR2 PRT
GIIPIFGTPNYAQKFQ

SEQ ID NO: 473 - DNA, 51 bp, Artificial Sequence; identical to SEQ ID NO: 433
  YU534-F06 HCDR3 DNA

SEQ ID NO: 474 - protein, 16 aa, Artificial Sequence
  YU534-F06 HCDR3 PRT
DKGFGEGKGYHYYGLD

SEQ ID NO: 475 - DNA, 42 bp, Artificial Sequence
  YU534-F06 LCDR1 DNA
actggaaccagcagtgatgttgggagttataaccttgtctcc

SEQ ID NO: 476 - protein, 14 aa, Artificial Sequence
  YU534-F06 LCDR1 PRT
TGTSSDVGSYNLVS

SEQ ID NO: 477 - DNA, 21 bp, Artificial Sequence
  YU534-F06 LCDR2 DNA
gaggtcagtaagcggccctca

SEQ ID NO: 478 - protein, 7 aa, Artificial Sequence
  YU534-F06 LCDR2 PRT
EVSKRPS

SEQ ID NO: 479 - DNA, 30 bp, Artificial Sequence
  YU534-F06 LCDR3 DNA
agctcatatgcaggcagcaacaatgtggta

SEQ ID NO: 480 - protein, 10 aa, Artificial Sequence
  YU534-F06 LCDR3 PRT
SSYAGSNNVV

SEQ ID NO: 481 - DNA, 330 bp, Artificial Sequence
  YU534-F06 VL DNA
cagtctgccctgactcagcctgcctccgtgtctgggtctcctggacagtcgatcaccatctcctgcactggaaccagcagtgatgttgggagttataaccttgtctcctggtaccaacagcacccaggcaaagcccccaaactcatgatttatgaggtcagtaagcggccctcaggggtttctaatcgcttctctggctccaagtctggcaacacggcctccctgaccgtctctgggctccaggctgaggatgaggctgattattactgcagctcatatgcaggcagcaacaatgtggtattcggcggaggcacccagctgaccgtcctc

SEQ ID NO: 482 - protein, 110 aa, Artificial Sequence
  YU534-F06 VL PRT
QSALTQPASVSGSPGQSITISCTGTSSDVGSYNLVSWYQQHPGKAPKLMIYEVSKRPSGVSNRFSGSKSGNTASLTVSGLQAEDEADYYCSSYAGSNNVVFGGGTQLTVL

SEQ ID NO: 483 - DNA, 378 bp, Artificial Sequence
  YU534-F06 VH DNA
gaggtgcagctggtgcagtctggggctgaggtgaagaagcctgggtcctcggtgaaggtctcctgcaaggcttctggaggcaccttcaccagttatgctatcacctgggtgcgacaggcccctggacaagggcttgagtggatgggagggatcatccctatctttggtacaccaaactacgcacagaagttccaggacagagtcacgattaccgcagacaaatccacgagcacagcctacatggagctgagcagcctgagatctgaggacacggccgtgtattactgtgcgaatgataaagggttcggggaggggaaaggttaccactactacggtctggacgtctggggccaagggaccctggtcaccgtgtcctca

SEQ ID NO: 484 - protein, 126 aa, Artificial Sequence
  YU534-F06 VH PRT
EVQLVQSGAEVKKPGSSVKVSCKASGGTFTSYAITWVRQAPGQGLEWMGGIIPIFGTPNYAQKFQDRVTITADKSTSTAYMELSSLRSEDTAVYYCANDKGFGEGKGYHYYGLDVWGQGTLVTVSS

SEQ ID NO: 485 - DNA, 1362 bp, Artificial Sequence
  YU534-F06 VH complete DNA
gaggtgcagctggtgcagtctggggctgaggtgaagaagcctgggtcctcggtgaaggtctcctgcaaggcttctggaggcaccttcaccagttatgctatcacctgggtgcgacaggcccctggacaagggcttgagtggatgggagggatcatccctatctttggtacaccaaactacgcacagaagttccaggacagagtcacgattaccgcagacaaatccacgagcacagcctacatggagctgagcagcctgagatctgaggacacggccgtgtattactgtgcgaatgataaagggttcggggaggggaaaggttaccactactacggtctggacgtctggggccaagggaccctggtcaccgtgtcctcagctagcaccaagggcccatcggtcttccccctggcaccctcctccaagagcacctctgggggcacagcggccctgggctgcctggtcaaggactacttccccgaaccggtgacggtgtcgtggaactcaggcgccctgaccagcggcgtgcacaccttcccggctgtcctacagtcctcaggactctactccctcagcagcgtggtgaccgtgccctccagcagcttgggcacccagacctacatctgcaacgtgaatcacaagcccagcaacaccaaggtggacaagaaagttgagcccaaatcttgtgacaaaactcacacatgcccaccgtgcccagcacctccagtggccggaccgtcagtcttcctcttccccccaaaacccaaggacaccctcatgatctcccggacccctgaggtcacatgcgtggtggtgggcgtgagccacgaagaccctgaggtcaagttcaactggtacgtggacggcgtggaggtgcataatgccaagacaaagccgcgggaggagcagtacaacagcacgtaccgggtggtcagcgtcctcaccgtcctgcaccaggactggctgaatggcaaggagtacaagtgcaaggtctccaacaaacagctcccatcccccatcgagaaaaccatctccaaagccaaagggcagccccgagaaccacaggtgtacaccctgcccccatcccgggatgagctgaccaagaaccaggtcagcctgacctgcctggtcaaaggcttctatcccagcgacatcgccgtggagtgggagagcaatgggcagccggagaacaactacaagaccacgcctcccgtgctggactccgacggctccttcttcctctacagcaagctcaccgtggacaagagcaggtggcagcaggggaacgtcttctcatgctccgtgatgcatgaggctctgcacaaccactacacgcagaaaagcctctccctgtccccgggt

SEQ ID NO: 486 - protein, 454 aa, Artificial Sequence
  YU534-F06 VH complete PRT
EVQLVQSGAEVKKPGSSVKVSCKASGGTFTSYAITWVRQAPGQGLEWMGGIIPIFGTPNYAQKFQDRVTITADKSTSTAYMELSSLRSEDTAVYYCANDKGFGEGKGYHYYGLDVWGQGTLVTVSSASTKGPSVFPLAPSSKSTSGGTAALGCLVKDYFPEPVTVSWNSGALTSGVHTFPAVLQSSGLYSLSSVVTVPSSSLGTQTYICNVNHKPSNTKVDKKVEPKSCDKTHTCPPCPAPPVAGPSVFLFPPKPKDTLMISRTPEVTCVVVGVSHEDPEVKFNWYVDGVEVHNAKTKPREEQYNSTYRVVSVLTVLHQDWLNGKEYKCKVSNKQLPSPIEKTISKAKGQPREPQVYTLPPSRDELTKNQVSLTCLVKGFYPSDIAVEWESNGQPENNYKTTPPVLDSDGSFFLYSKLTVDKSRWQQGNVFSCSVMHEALHNHYTQKSLSLSPG

SEQ ID NO: 487 - DNA, 648 bp, Artificial Sequence
  YU534-F06 VL complete DNA
cagtctgccctgactcagcctgcctccgtgtctgggtctcctggacagtcgatcaccatctcctgcactggaaccagcagtgatgttgggagttataaccttgtctcctggtaccaacagcacccaggcaaagcccccaaactcatgatttatgaggtcagtaagcggccctcaggggtttctaatcgcttctctggctccaagtctggcaacacggcctccctgaccgtctctgggctccaggctgaggatgaggctgattattactgcagctcatatgcaggcagcaacaatgtggtattcggcggaggcacccagctgaccgtcctcggtcagcccaaggctgcaccaagtgtcactctgttcccgccctcctctgaggagcttcaagccaacaaggccacactggtgtgtctcataagtgacttctacccgggagccgtgacagtggcctggaaggcagatagcagccccgtcaaggcgggagtggagaccaccacaccctccaaacaaagcaacaacaagtacgcggccagcagctatctgagcctgacgcctgagcagtggaagtcccacagaagctacagctgccaggtcacgcatgaagggagcaccgtggagaagacagtggcccctacagaatgttca

SEQ ID NO: 488 - protein, 216 aa, Artificial Sequence
  YU534-F06 VL complete PRT
QSALTQPASVSGSPGQSITISCTGTSSDVGSYNLVSWYQQHPGKAPKLMIYEVSKRPSGVSNRFSGSKSGNTASLTVSGLQAEDEADYYCSSYAGSNNVVFGGGTQLTVLGQPKAAPSVTLFPPSSEELQANKATLVCLISDFYPGAVTVAWKADSSPVKAGVETTTPSKQSNNKYAASSYLSLTPEQWKSHRSYSCQVTHEGSTVEKTVAPTECS

SEQ ID NO: 489 - DNA, 15 bp, Artificial Sequence
  YU534-C05 HCDR1 DNA
agctatgctatcagc

SEQ ID NO: 490 - protein, 5 aa, Artificial Sequence
  YU534-C05 HCDR1 PRT
SYAIS

SEQ ID NO: 491 - DNA, 51 bp, Artificial Sequence; identical to SEQ ID NO: 51
  YU534-C05 HCDR2 DNA

SEQ ID NO: 492 - protein, 16 aa, Artificial Sequence
  YU534-C05 HCDR2 PRT
WINPNSGGTNYAQKFQ

SEQ ID NO: 493 - DNA, 48 bp, Artificial Sequence
  YU534-C05 HCDR3 DNA
ggaccactaccgtataactggaactacgaaggacactggttcgacccc

SEQ ID NO: 494 - protein, 16 aa, Artificial Sequence
  YU534-C05 HCDR3 PRT
GPLPYNWNYEGHWFDP

SEQ ID NO: 495 - DNA, 39 bp, Artificial Sequence; identical to SEQ ID NO: 395
  YU534-C05 LCDR1 DNA

SEQ ID NO: 496 - protein, 13 aa, Artificial Sequence
  YU534-C05 LCDR1 PRT
SGSSSNIGNNYVS

SEQ ID NO: 497 - DNA, 21 bp, Artificial Sequence
  YU534-C05 LCDR2 DNA
ggtaacagcaatcggccctca

SEQ ID NO: 498 - protein, 7 aa, Artificial Sequence
  YU534-C05 LCDR2 PRT
GNSNRPS

SEQ ID NO: 499 - DNA, 33 bp, Artificial Sequence
  YU534-C05 LCDR3 DNA
cagtcctatgacagcagcctgagtggttcggta

SEQ ID NO: 500 - protein, 11 aa, Artificial Sequence
  YU534-C05 LCDR3 PRT
QSYDSSLSGSV

SEQ ID NO: 501 - DNA, 330 bp, Artificial Sequence
  YU534-C05 VL DNA
cagtctgtgttgacgcagccgccctcagtgtctgcggccccaggacagaaggtcaccatctcctgctctggaagcagctccaacattgggaataattatgtatcctggtaccagcagctcccaggaacagcccccaaactcctcatctatggtaacagcaatcggccctcaggggtccctgaccgattctctggctccaagtctggcacctcagcctccctggccatcactgggctccaggctgaggatgaggctgattattactgccagtcctatgacagcagcctgagtggttcggtattcggcggagggaccaagctgaccgtccta

SEQ ID NO: 502 - protein, 110 aa, Artificial Sequence
  YU534-C05 VL PRT
QSVLTQPPSVSAAPGQKVTISCSGSSSNIGNNYVSWYQQLPGTAPKLLIYGNSNRPSGVPDRFSGSKSGTSASLAITGLQAEDEADYYCQSYDSSLSGSVFGGGTKLTVL

SEQ ID NO: 503 - DNA, 375 bp, Artificial Sequence
  YU534-C05 VH DNA
caggtgcagctggtgcagtctggggctgaggtgaagaagcctgggtcctcggtgaaggtctcctgcaaggcttctggaggcaccttcagcagctatgctatcagctgggtgcgacaggcccctggacaagggcttgagtggatgggatggatcaaccctaacagtggtggcacaaactatgcacagaagtttcagggcagggtcaccatgaccagggacacgtccatcagcacagcctacatggagctgagcaggctgagatctgacgacacggccgtgtattactgtgcgagaggaccactaccgtataactggaactacgaaggacactggttcgacccctggggccagggaaccctggtcaccgtgtcctca

SEQ ID NO: 504 - protein, 125 aa, Artificial Sequence
  YU534-C05 VH PRT
QVQLVQSGAEVKKPGSSVKVSCKASGGTFSSYAISWVRQAPGQGLEWMGWINPNSGGTNYAQKFQGRVTMTRDTSISTAYMELSRLRSDDTAVYYCARGPLPYNWNYEGHWFDPWGQGTLVTVSS

SEQ ID NO: 505 - DNA, 1359 bp, Artificial Sequence
  YU534-C05 VH complete DNA
caggtgcagctggtgcagtctggggctgaggtgaagaagcctgggtcctcggtgaaggtctcctgcaaggcttctggaggcaccttcagcagctatgctatcagctgggtgcgacaggcccctggacaagggcttgagtggatgggatggatcaaccctaacagtggtggcacaaactatgcacagaagtttcagggcagggtcaccatgaccagggacacgtccatcagcacagcctacatggagctgagcaggctgagatctgacgacacggccgtgtattactgtgcgagaggaccactaccgtataactggaactacgaaggacactggttcgacccctggggccagggaaccctggtcaccgtgtcctcagctagcaccaagggcccatcggtcttccccctggcaccctcctccaagagcacctctgggggcacagcggccctgggctgcctggtcaaggactacttccccgaaccggtgacggtgtcgtggaactcaggcgccctgaccagcggcgtgcacaccttcccggctgtcctacagtcctcaggactctactccctcagcagcgtggtgaccgtgccctccagcagcttgggcacccagacctacatctgcaacgtgaatcacaagcccagcaacaccaaggtggacaagaaagttgagcccaaatcttgtgacaaaactcacacatgcccaccgtgcccagcacctccagtggccggaccgtcagtcttcctcttccccccaaaacccaaggacaccctcatgatctcccggacccctgaggtcacatgcgtggtggtgggcgtgagccacgaagaccctgaggtcaagttcaactggtacgtggacggcgtggaggtgcataatgccaagacaaagccgcgggaggagcagtacaacagcacgtaccgggtggtcagcgtcctcaccgtcctgcaccaggactggctgaatggcaaggagtacaagtgcaaggtctccaacaaacagctcccatcccccatcgagaaaaccatctccaaagccaaagggcagccccgagaaccacaggtgtacaccctgcccccatcccgggatgagctgaccaagaaccaggtcagcctgacctgcctggtcaaaggcttctatcccagcgacatcgccgtggagtgggagagcaatgggcagccggagaacaactacaagaccacgcctcccgtgctggactccgacggctccttcttcctctacagcaagctcaccgtggacaagagcaggtggcagcaggggaacgtcttctcatgctccgtgatgcatgaggctctgcacaaccactacacgcagaaaagcctctccctgtccccgggt

SEQ ID NO: 506 - protein, 453 aa, Artificial Sequence
  YU534-C05 VH complete PRT
QVQLVQSGAEVKKPGSSVKVSCKASGGTFSSYAISWVRQAPGQGLEWMGWINPNSGGTNYAQKFQGRVTMTRDTSISTAYMELSRLRSDDTAVYYCARGPLPYNWNYEGHWFDPWGQGTLVTVSSASTKGPSVFPLAPSSKSTSGGTAALGCLVKDYFPEPVTVSWNSGALTSGVHTFPAVLQSSGLYSLSSVVTVPSSSLGTQTYICNVNHKPSNTKVDKKVEPKSCDKTHTCPPCPAPPVAGPSVFLFPPKPKDTLMISRTPEVTCVVVGVSHEDPEVKFNWYVDGVEVHNAKTKPREEQYNSTYRVVSVLTVLHQDWLNGKEYKCKVSNKQLPSPIEKTISKAKGQPREPQVYTLPPSRDELTKNQVSLTCLVKGFYPSDIAVEWESNGQPENNYKTTPPVLDSDGSFFLYSKLTVDKSRWQQGNVFSCSVMHEALHNHYTQKSLSLSPG

SEQ ID NO: 507 - DNA, 648 bp, Artificial Sequence
  YU534-C05 VL complete DNA
cagtctgtgttgacgcagccgccctcagtgtctgcggccccaggacagaaggtcaccatctcctgctctggaagcagctccaacattgggaataattatgtatcctggtaccagcagctcccaggaacagcccccaaactcctcatctatggtaacagcaatcggccctcaggggtccctgaccgattctctggctccaagtctggcacctcagcctccctggccatcactgggctccaggctgaggatgaggctgattattactgccagtcctatgacagcagcctgagtggttcggtattcggcggagggaccaagctgaccgtcctaggtcagcccaaggctgcaccaagtgtcactctgttcccgccctcctctgaggagcttcaagccaacaaggccacactggtgtgtctcataagtgacttctacccgggagccgtgacagtggcctggaaggcagatagcagccccgtcaaggcgggagtggagaccaccacaccctccaaacaaagcaacaacaagtacgcggccagcagctatctgagcctgacgcctgagcagtggaagtcccacagaagctacagctgccaggtcacgcatgaagggagcaccgtggagaagacagtggcccctacagaatgttca

SEQ ID NO: 508 - protein, 216 aa, Artificial Sequence
  YU534-C05 VL complete PRT
QSVLTQPPSVSAAPGQKVTISCSGSSSNIGNNYVSWYQQLPGTAPKLLIYGNSNRPSGVPDRFSGSKSGTSASLAITGLQAEDEADYYCQSYDSSLSGSVFGGGTKLTVLGQPKAAPSVTLFPPSSEELQANKATLVCLISDFYPGAVTVAWKADSSPVKAGVETTTPSKQSNNKYAASSYLSLTPEQWKSHRSYSCQVTHEGSTVEKTVAPTECS

SEQ ID NO: 509 - DNA, 15 bp, Artificial Sequence
  YU534-D09 HCDR1 DNA
agttatgctatcacc

SEQ ID NO: 510 - protein, 5 aa, Artificial Sequence
  YU534-D09 HCDR1 PRT
SYAIT

SEQ ID NO: 511 - DNA, 51 bp, Artificial Sequence; identical to SEQ ID NO: 431
  YU534-D09 HCDR2 DNA

SEQ ID NO: 512 - protein, 16 aa, Artificial Sequence
  YU534-D09 HCDR2 PRT
GIIPIFGTPNYAQKFQ

SEQ ID NO: 513 - DNA, 51 bp, Artificial Sequence
  YU534-D09 HCDR3 DNA
gataaagggctcggggaggggaaaggttaccactactacggtctggacgtc

SEQ ID NO: 514 - protein, 16 aa, Artificial Sequence
  YU534-D09 HCDR3 PRT
DKGLGEGKGYHYYGLD

SEQ ID NO: 515 - DNA, 42 bp, Artificial Sequence; identical to SEQ ID NO: 35
  YU534-D09 LCDR1 DNA

SEQ ID NO: 516 - protein, 14 aa, Artificial Sequence
  YU534-D09 LCDR1 PRT
TGTSSDVGGYNYVS

SEQ ID NO: 517 - DNA, 21 bp, Artificial Sequence
  YU534-D09 LCDR2 DNA
gaggtcagtaatcggccctca

SEQ ID NO: 518 - protein, 7 aa, Artificial Sequence
  YU534-D09 LCDR2 PRT
EVSNRPS

SEQ ID NO: 519 - DNA, 30 bp, Artificial Sequence
  YU534-D09 LCDR3 DNA
acctcatatacaagtaacagcaatctcgcc

SEQ ID NO: 520 - protein, 10 aa, Artificial Sequence
  YU534-D09 LCDR3 PRT
TSYTSNSNLA

SEQ ID NO: 521 - DNA, 330 bp, Artificial Sequence
  YU534-D09 VL DNA
cagtctgccctgactcagcctgcctccgtgtctgggtctcctggacagtcgatcaccatctcctgcactggaaccagcagtgacgttggtggttataactatgtctcctggtaccaacagcacccaggcaaagcccccaaactcatgatttatgaggtcagtaatcggccctcaggggtttctaatcgcttctctggctccaagtctggcaacacggcctccctgaccatctctgggctccaggctgaggacgaggctgattattactgcacctcatatacaagtaacagcaatctcgccttcggatctgggaccaagctgaccgtccta

SEQ ID NO: 522 - protein, 110 aa, Artificial Sequence
  YU534-D09 VL PRT
QSALTQPASVSGSPGQSITISCTGTSSDVGGYNYVSWYQQHPGKAPKLMIYEVSNRPSGVSNRFSGSKSGNTASLTISGLQAEDEADYYCTSYTSNSNLAFGSGTKLTVL

SEQ ID NO: 523 - DNA, 378 bp, Artificial Sequence
  YU534-D09 VH DNA
caggttcagctggtgcagtctggggctgaggtgaagaagcctgggtcctcggtgaaggtctcctgcaaggcttctggaggcaccttcagcagttatgctatcacctgggtgcgacaggcccctggacaagggcttgagtggatgggagggatcatccctatctttggtacaccaaactacgcacagaagttccaggacagagtcacgattaccgcagacaaatccacgagcacagcctacatggagctgagcagcctgagatctgaggacacggccgtgtattactgtgcgaatgataaagggctcggggaggggaaaggttaccactactacggtctggacgtctggggccaagggaccctggtcaccgtgtcctca

SEQ ID NO: 524 - protein, 126 aa, Artificial Sequence
  YU534-D09 VH PRT
QVQLVQSGAEVKKPGSSVKVSCKASGGTFSSYAITWVRQAPGQGLEWMGGIIPIFGTPNYAQKFQDRVTITADKSTSTAYMELSSLRSEDTAVYYCANDKGLGEGKGYHYYGLDVWGQGTLVTVSS

SEQ ID NO: 525 - DNA, 1362 bp, Artificial Sequence
  YU534-D09 VH complete DNA
caggttcagctggtgcagtctggggctgaggtgaagaagcctgggtcctcggtgaaggtctcctgcaaggcttctggaggcaccttcagcagttatgctatcacctgggtgcgacaggcccctggacaagggcttgagtggatgggagggatcatccctatctttggtacaccaaactacgcacagaagttccaggacagagtcacgattaccgcagacaaatccacgagcacagcctacatggagctgagcagcctgagatctgaggacacggccgtgtattactgtgcgaatgataaagggctcggggaggggaaaggttaccactactacggtctggacgtctggggccaagggaccctggtcaccgtgtcctcagctagcaccaagggcccatcggtcttccccctggcaccctcctccaagagcacctctgggggcacagcggccctgggctgcctggtcaaggactacttccccgaaccggtgacggtgtcgtggaactcaggcgccctgaccagcggcgtgcacaccttcccggctgtcctacagtcctcaggactctactccctcagcagcgtggtgaccgtgccctccagcagcttgggcacccagacctacatctgcaacgtgaatcacaagcccagcaacaccaaggtggacaagaaagttgagcccaaatcttgtgacaaaactcacacatgcccaccgtgcccagcacctccagtggccggaccgtcagtcttcctcttccccccaaaacccaaggacaccctcatgatctcccggacccctgaggtcacatgcgtggtggtgggcgtgagccacgaagaccctgaggtcaagttcaactggtacgtggacggcgtggaggtgcataatgccaagacaaagccgcgggaggagcagtacaacagcacgtaccgggtggtcagcgtcctcaccgtcctgcaccaggactggctgaatggcaaggagtacaagtgcaaggtctccaacaaacagctcccatcccccatcgagaaaaccatctccaaagccaaagggcagccccgagaaccacaggtgtacaccctgcccccatcccgggatgagctgaccaagaaccaggtcagcctgacctgcctggtcaaaggcttctatcccagcgacatcgccgtggagtgggagagcaatgggcagccggagaacaactacaagaccacgcctcccgtgctggactccgacggctccttcttcctctacagcaagctcaccgtggacaagagcaggtggcagcaggggaacgtcttctcatgctccgtgatgcatgaggctctgcacaaccactacacgcagaaaagcctctccctgtccccgggt

SEQ ID NO: 526 - protein, 454 aa, Artificial Sequence
  YU534-D09 VH complete PRT
QVQLVQSGAEVKKPGSSVKVSCKASGGTFSSYAITWVRQAPGQGLEWMGGIIPIFGTPNYAQKFQDRVTITADKSTSTAYMELSSLRSEDTAVYYCANDKGLGEGKGYHYYGLDVWGQGTLVTVSSASTKGPSVFPLAPSSKSTSGGTAALGCLVKDYFPEPVTVSWNSGALTSGVHTFPAVLQSSGLYSLSSVVTVPSSSLGTQTYICNVNHKPSNTKVDKKVEPKSCDKTHTCPPCPAPPVAGPSVFLFPPKPKDTLMISRTPEVTCVVVGVSHEDPEVKFNWYVDGVEVHNAKTKPREEQYNSTYRVVSVLTVLHQDWLNGKEYKCKVSNKQLPSPIEKTISKAKGQPREPQVYTLPPSRDELTKNQVSLTCLVKGFYPSDIAVEWESNGQPENNYKTTPPVLDSDGSFFLYSKLTVDKSRWQQGNVFSCSVMHEALHNHYTQKSLSLSPG

SEQ ID NO: 527 - DNA, 648 bp, Artificial Sequence
  YU534-D09 VL complete DNA
cagtctgccctgactcagcctgcctccgtgtctgggtctcctggacagtcgatcaccatctcctgcactggaaccagcagtgacgttggtggttataactatgtctcctggtaccaacagcacccaggcaaagcccccaaactcatgatttatgaggtcagtaatcggccctcaggggtttctaatcgcttctctggctccaagtctggcaacacggcctccctgaccatctctgggctccaggctgaggacgaggctgattattactgcacctcatatacaagtaacagcaatctcgccttcggatctgggaccaagctgaccgtcctaggtcagcccaaggctgcaccaagtgtcactctgttcccgccctcctctgaggagcttcaagccaacaaggccacactggtgtgtctcataagtgacttctacccgggagccgtgacagtggcctggaaggcagatagcagccccgtcaaggcgggagtggagaccaccacaccctccaaacaaagcaacaacaagtacgcggccagcagctatctgagcctgacgcctgagcagtggaagtcccacagaagctacagctgccaggtcacgcatgaagggagcaccgtggagaagacagtggcccctacagaatgttca

SEQ ID NO: 528 - protein, 216 aa, Artificial Sequence
  YU534-D09 VL complete PRT
QSALTQPASVSGSPGQSITISCTGTSSDVGGYNYVSWYQQHPGKAPKLMIYEVSNRPSGVSNRFSGSKSGNTASLTISGLQAEDEADYYCTSYTSNSNLAFGSGTKLTVLGQPKAAPSVTLFPPSSEELQANKATLVCLISDFYPGAVTVAWKADSSPVKAGVETTTPSKQSNNKYAASSYLSLTPEQWKSHRSYSCQVTHEGSTVEKTVAPTECS

SEQ ID NO: 529 - DNA, 15 bp, Artificial Sequence
  YU535-C06 HCDR1 DNA
agctatgctatgcat

SEQ ID NO: 530 - protein, 5 aa, Artificial Sequence
  YU535-C06 HCDR1 PRT
SYAMH

SEQ ID NO: 531 - DNA, 51 bp, Artificial Sequence; identical to SEQ ID NO: 191
  YU535-C06 HCDR2 DNA

SEQ ID NO: 532 - protein, 16 aa, Artificial Sequence
  YU535-C06 HCDR2 PRT
WINAGNGNTKYSQKFQ

SEQ ID NO: 533 - DNA, 45 bp, Artificial Sequence
  YU535-C06 HCDR3 DNA
tcgttcgattcggggagttattataacgtagatgcttttgatatc

SEQ ID NO: 534 - protein, 15 aa, Artificial Sequence
  YU535-C06 HCDR3 PRT
SFDSGSYYNVDAFDI

SEQ ID NO: 535 - DNA, 33 bp, Artificial Sequence; identical to SEQ ID NO: 95
  YU535-C06 LCDR1 DNA

SEQ ID NO: 536 - protein, 11 aa, Artificial Sequence
  YU535-C06 LCDR1 PRT
RASQSISSWLA

SEQ ID NO: 537 - DNA, 21 bp, Artificial Sequence
  YU535-C06 LCDR2 DNA
gatgcctccagtttggaaagt

SEQ ID NO: 538 - protein, 7 aa, Artificial Sequence
  YU535-C06 LCDR2 PRT
DASSLES

SEQ ID NO: 539 - DNA, 27 bp, Artificial Sequence
  YU535-C06 LCDR3 DNA
caacagtataatagttattcgtggacg

SEQ ID NO: 540 - protein, 9 aa, Artificial Sequence
  YU535-C06 LCDR3 PRT
QQYNSYSWT

SEQ ID NO: 541 - DNA, 321 bp, Artificial Sequence
  YU535-C06 VL DNA
gacatcgtgatgacccagtctccttccaccctgtctgcatctgtaggagacagagtcaccatcacttgccgggccagtcagagtattagtagctggttggcctggtatcagcagaaaccagggaaagcccctaagctcctgatctatgatgcctccagtttggaaagtggggtcccatcaaggttcagcggcagtggatctgggacagaattcactctcaccatcagcagcctgcagcctgatgattttgcaacttattactgccaacagtataatagttattcgtggacgttcggccaagggaccaaggtggagatcaaa

SEQ ID NO: 542 - protein, 107 aa, Artificial Sequence
  YU535-C06 VL PRT
DIVMTQSPSTLSASVGDRVTITCRASQSISSWLAWYQQKPGKAPKLLIYDASSLESGVPSRFSGSGSGTEFTLTISSLQPDDFATYYCQQYNSYSWTFGQGTKVEIK

SEQ ID NO: 543 - DNA, 372 bp, Artificial Sequence
  YU535-C06 VH DNA
caggttcagctggtgcagtctggggctgaggtgaagaagcctggggcctcagtgaaggtttcctgcaaggcttctggatacaccttcactagctatgctatgcattgggtgcgccaggcccccggacaaaggcctgagtggatgggatggatcaacgctggcaatggtaacacaaaatattcacagaagttccagggcagagtcaccattaccagggacacatccgcgagcacagcctacatggagctgagcagcctgagatctgaagacacggctgtgtattactgtgcgagatcgttcgattcggggagttattataacgtagatgcttttgatatctggggccaagggacaatggtcaccgtgtcttca

SEQ ID NO: 544 - protein, 124 aa, Artificial Sequence
  YU535-C06 VH PRT
QVQLVQSGAEVKKPGASVKVSCKASGYTFTSYAMHWVRQAPGQRPEWMGWINAGNGNTKYSQKFQGRVTITRDTSASTAYMELSSLRSEDTAVYYCARSFDSGSYYNVDAFDIWGQGTMVTVSS

SEQ ID NO: 545 - DNA, 1356 bp, Artificial Sequence
  YU535-C06 VH complete DNA
caggttcagctggtgcagtctggggctgaggtgaagaagcctggggcctcagtgaaggtttcctgcaaggcttctggatacaccttcactagctatgctatgcattgggtgcgccaggcccccggacaaaggcctgagtggatgggatggatcaacgctggcaatggtaacacaaaatattcacagaagttccagggcagagtcaccattaccagggacacatccgcgagcacagcctacatggagctgagcagcctgagatctgaagacacggctgtgtattactgtgcgagatcgttcgattcggggagttattataacgtagatgcttttgatatctggggccaagggacaatggtcaccgtgtcttcagctagcaccaagggcccatcggtcttccccctggcaccctcctccaagagcacctctgggggcacagcggccctgggctgcctggtcaaggactacttccccgaaccggtgacggtgtcgtggaactcaggcgccctgaccagcggcgtgcacaccttcccggctgtcctacagtcctcaggactctactccctcagcagcgtggtgaccgtgccctccagcagcttgggcacccagacctacatctgcaacgtgaatcacaagcccagcaacaccaaggtggacaagaaagttgagcccaaatcttgtgacaaaactcacacatgcccaccgtgcccagcacctccagtggccggaccgtcagtcttcctcttccccccaaaacccaaggacaccctcatgatctcccggacccctgaggtcacatgcgtggtggtgggcgtgagccacgaagaccctgaggtcaagttcaactggtacgtggacggcgtggaggtgcataatgccaagacaaagccgcgggaggagcagtacaacagcacgtaccgggtggtcagcgtcctcaccgtcctgcaccaggactggctgaatggcaaggagtacaagtgcaaggtctccaacaaacagctcccatcccccatcgagaaaaccatctccaaagccaaagggcagccccgagaaccacaggtgtacaccctgcccccatcccgggatgagctgaccaagaaccaggtcagcctgacctgcctggtcaaaggcttctatcccagcgacatcgccgtggagtgggagagcaatgggcagccggagaacaactacaagaccacgcctcccgtgctggactccgacggctccttcttcctctacagcaagctcaccgtggacaagagcaggtggcagcaggggaacgtcttctcatgctccgtgatgcatgaggctctgcacaaccactacacgcagaaaagcctctccctgtccccgggt

SEQ ID NO: 546 - protein, 452 aa, Artificial Sequence
  YU535-C06 VH complete PRT
QVQLVQSGAEVKKPGASVKVSCKASGYTFTSYAMHWVRQAPGQRPEWMGWINAGNGNTKYSQKFQGRVTITRDTSASTAYMELSSLRSEDTAVYYCARSFDSGSYYNVDAFDIWGQGTMVTVSSASTKGPSVFPLAPSSKSTSGGTAALGCLVKDYFPEPVTVSWNSGALTSGVHTFPAVLQSSGLYSLSSVVTVPSSSLGTQTYICNVNHKPSNTKVDKKVEPKSCDKTHTCPPCPAPPVAGPSVFLFPPKPKDTLMISRTPEVTCVVVGVSHEDPEVKFNWYVDGVEVHNAKTKPREEQYNSTYRVVSVLTVLHQDWLNGKEYKCKVSNKQLPSPIEKTISKAKGQPREPQVYTLPPSRDELTKNQVSLTCLVKGFYPSDIAVEWESNGQPENNYKTTPPVLDSDGSFFLYSKLTVDKSRWQQGNVFSCSVMHEALHNHYTQKSLSLSPG

SEQ ID NO: 547 - DNA, 642 bp, Artificial Sequence
  YU535-C06 VL complete DNA
gacatcgtgatgacccagtctccttccaccctgtctgcatctgtaggagacagagtcaccatcacttgccgggccagtcagagtattagtagctggttggcctggtatcagcagaaaccagggaaagcccctaagctcctgatctatgatgcctccagtttggaaagtggggtcccatcaaggttcagcggcagtggatctgggacagaattcactctcaccatcagcagcctgcagcctgatgattttgcaacttattactgccaacagtataatagttattcgtggacgttcggccaagggaccaaggtggagatcaaacgtacggtggctgcaccatctgtgttcatcttcccgccatctgatgagcagttgaaatctggaactgcctctgttgtgtgcctgctgaataacttctatcccagagaggccaaagtacagtggaaggtggataacgccctccaatcgggtaactcccaggagagtgtcacagagcaggacagcaaggacagcacctacagcctcagcagcaccctgacgctgagcaaagcagactacgagaaacacaaagtctacgcctgcgaagtcacccatcagggcctgagctcgcccgtcacaaagagcttcaacaggggagagtgt

SEQ ID NO: 548 - protein, 214 aa, Artificial Sequence
  YU535-C06 VL complete PRT
DIVMTQSPSTLSASVGDRVTITCRASQSISSWLAWYQQKPGKAPKLLIYDASSLESGVPSRFSGSGSGTEFTLTISSLQPDDFATYYCQQYNSYSWTFGQGTKVEIKRTVAAPSVFIFPPSDEQLKSGTASVVCLLNNFYPREAKVQWKVDNALQSGNSQESVTEQDSKDSTYSLSSTLTLSKADYEKHKVYACEVTHQGLSSPVTKSFNRGEC

SEQ ID NO: 549 - DNA, 15 bp, Artificial Sequence
  YU535-A09 HCDR1 DNA
agctatgccatgagc

SEQ ID NO: 550 - protein, 5 aa, Artificial Sequence
  YU535-A09 HCDR1 PRT
SYAMS

SEQ ID NO: 551 - DNA, 51 bp, Artificial Sequence; identical to SEQ ID NO: 131
  YU535-A09 HCDR2 DNA

SEQ ID NO: 552 - protein, 16 aa, Artificial Sequence
  YU535-A09 HCDR2 PRT
AISGSGGSTYYADSVK

SEQ ID NO: 553 - DNA, 33 bp, Artificial Sequence
  YU535-A09 HCDR3 DNA
ggtccgagggggtctgctgactacgttgactac

SEQ ID NO: 554 - protein, 11 aa, Artificial Sequence
  YU535-A09 HCDR3 PRT
GPRGSADYVDY

SEQ ID NO: 555 - DNA, 33 bp, Artificial Sequence
  YU535-A09 LCDR1 DNA
cgggccagtcacagtattagtagctggttggcc

SEQ ID NO: 556 - protein, 11 aa, Artificial Sequence
  YU535-A09 LCDR1 PRT
RASHSISSWLA

SEQ ID NO: 557 - DNA, 21 bp, Artificial Sequence
  YU535-A09 LCDR2 DNA
gatgcctccagtttggaaagt

SEQ ID NO: 558 - protein, 7 aa, Artificial Sequence
  YU535-A09 LCDR2 PRT
DASSLES

SEQ ID NO: 559 - DNA, 27 bp, Artificial Sequence
  YU535-A09 LCDR3 DNA
caacagtataatacttattcagggacg

SEQ ID NO: 560 - protein, 9 aa, Artificial Sequence
  YU535-A09 LCDR3 PRT
QQYNTYSGT

SEQ ID NO: 561 - DNA, 321 bp, Artificial Sequence
  YU535-A09 VL DNA
gacatccagttgacccagtctccttccaccctgtctgcatctgtaggagacagagtcaccatcacttgccgggccagtcacagtattagtagctggttggcctggtatcagcagaaaccagggaaagcccctcagctcctgatctatgatgcctccagtttggaaagtggggtcccatcaaggttcagcggcagtggatctgggacagaattcactctcaccatcagcagcctgcagcctgatgattttgcaacttattactgccaacagtataatacttattcagggacgttcggccaagggaccaaagtggatatcaaa

SEQ ID NO: 562 - protein, 107 aa, Artificial Sequence
  YU535-A09 VL PRT
DIQLTQSPSTLSASVGDRVTITCRASHSISSWLAWYQQKPGKAPQLLIYDASSLESGVPSRFSGSGSGTEFTLTISSLQPDDFATYYCQQYNTYSGTFGQGTKVDIK

SEQ ID NO: 563 - DNA, 360 bp, Artificial Sequence
  YU535-A09 VH DNA
gaggtgcagctgttggagtctgggggaggcttggtacagcctggggggtccctgagactctcctgtgcagcctctggattcacctttagcagctatgccatgagctgggtccgccaggctccagggaaggggctggagtgggtctcagctattagtggtagtggtggtagcacatactacgcagactccgtgaagggccggttcaccatctccagagacaattccaagaacacgctgtatctgcaaatgaacagcctgagagccgaggacacggccgtatattactgtgcgaaaggtccgagggggtctgctgactacgttgactactggggccagggaaccctggtcaccgtgtcctca

SEQ ID NO: 564 - protein, 120 aa, Artificial Sequence
  YU535-A09 VH PRT
EVQLLESGGGLVQPGGSLRLSCAASGFTFSSYAMSWVRQAPGKGLEWVSAISGSGGSTYYADSVKGRFTISRDNSKNTLYLQMNSLRAEDTAVYYCAKGPRGSADYVDYWGQGTLVTVSS

SEQ ID NO: 565 - DNA, 1344 bp, Artificial Sequence
  YU535-A09 VH complete DNA
gaggtgcagctgttggagtctgggggaggcttggtacagcctggggggtccctgagactctcctgtgcagcctctggattcacctttagcagctatgccatgagctgggtccgccaggctccagggaaggggctggagtgggtctcagctattagtggtagtggtggtagcacatactacgcagactccgtgaagggccggttcaccatctccagagacaattccaagaacacgctgtatctgcaaatgaacagcctgagagccgaggacacggccgtatattactgtgcgaaaggtccgagggggtctgctgactacgttgactactggggccagggaaccctggtcaccgtgtcctcagctagcaccaagggcccatcggtcttccccctggcaccctcctccaagagcacctctgggggcacagcggccctgggctgcctggtcaaggactacttccccgaaccggtgacggtgtcgtggaactcaggcgccctgaccagcggcgtgcacaccttcccggctgtcctacagtcctcaggactctactccctcagcagcgtggtgaccgtgccctccagcagcttgggcacccagacctacatctgcaacgtgaatcacaagcccagcaacaccaaggtggacaagaaagttgagcccaaatcttgtgacaaaactcacacatgcccaccgtgcccagcacctccagtggccggaccgtcagtcttcctcttccccccaaaacccaaggacaccctcatgatctcccggacccctgaggtcacatgcgtggtggtgggcgtgagccacgaagaccctgaggtcaagttcaactggtacgtggacggcgtggaggtgcataatgccaagacaaagccgcgggaggagcagtacaacagcacgtaccgggtggtcagcgtcctcaccgtcctgcaccaggactggctgaatggcaaggagtacaagtgcaaggtctccaacaaacagctcccatcccccatcgagaaaaccatctccaaagccaaagggcagccccgagaaccacaggtgtacaccctgcccccatcccgggatgagctgaccaagaaccaggtcagcctgacctgcctggtcaaaggcttctatcccagcgacatcgccgtggagtgggagagcaatgggcagccggagaacaactacaagaccacgcctcccgtgctggactccgacggctccttcttcctctacagcaagctcaccgtggacaagagcaggtggcagcaggggaacgtcttctcatgctccgtgatgcatgaggctctgcacaaccactacacgcagaaaagcctctccctgtccccgggt

SEQ ID NO: 566 - protein, 448 aa, Artificial Sequence
  YU535-A09 VH complete PRT
EVQLLESGGGLVQPGGSLRLSCAASGFTFSSYAMSWVRQAPGKGLEWVSAISGSGGSTYYADSVKGRFTISRDNSKNTLYLQMNSLRAEDTAVYYCAKGPRGSADYVDYWGQGTLVTVSSASTKGPSVFPLAPSSKSTSGGTAALGCLVKDYFPEPVTVSWNSGALTSGVHTFPAVLQSSGLYSLSSVVTVPSSSLGTQTYICNVNHKPSNTKVDKKVEPKSCDKTHTCPPCPAPPVAGPSVFLFPPKPKDTLMISRTPEVTCVVVGVSHEDPEVKFNWYVDGVEVHNAKTKPREEQYNSTYRVVSVLTVLHQDWLNGKEYKCKVSNKQLPSPIEKTISKAKGQPREPQVYTLPPSRDELTKNQVSLTCLVKGFYPSDIAVEWESNGQPENNYKTTPPVLDSDGSFFLYSKLTVDKSRWQQGNVFSCSVMHEALHNHYTQKSLSLSPG

SEQ ID NO: 567 - DNA, 642 bp, Artificial Sequence
  YU535-A09 VL complete DNA
gacatccagttgacccagtctccttccaccctgtctgcatctgtaggagacagagtcaccatcacttgccgggccagtcacagtattagtagctggttggcctggtatcagcagaaaccagggaaagcccctcagctcctgatctatgatgcctccagtttggaaagtggggtcccatcaaggttcagcggcagtggatctgggacagaattcactctcaccatcagcagcctgcagcctgatgattttgcaacttattactgccaacagtataatacttattcagggacgttcggccaagggaccaaagtggatatcaaacgtacggtggctgcaccatctgtgttcatcttcccgccatctgatgagcagttgaaatctggaactgcctctgttgtgtgcctgctgaataacttctatcccagagaggccaaagtacagtggaaggtggataacgccctccaatcgggtaactcccaggagagtgtcacagagcaggacagcaaggacagcacctacagcctcagcagcaccctgacgctgagcaaagcagactacgagaaacacaaagtctacgcctgcgaagtcacccatcagggcctgagctcgcccgtcacaaagagcttcaacaggggagagtgt

SEQ ID NO: 568 - protein, 214 aa, Artificial Sequence
  YU535-A09 VL complete PRT
DIQLTQSPSTLSASVGDRVTITCRASHSISSWLAWYQQKPGKAPQLLIYDASSLESGVPSRFSGSGSGTEFTLTISSLQPDDFATYYCQQYNTYSGTFGQGTKVDIKRTVAAPSVFIFPPSDEQLKSGTASVVCLLNNFYPREAKVQWKVDNALQSGNSQESVTEQDSKDSTYSLSSTLTLSKADYEKHKVYACEVTHQGLSSPVTKSFNRGEC

SEQ ID NO: 569 - DNA, 15 bp, Artificial Sequence
  YU535-G09 HCDR1 DNA
agctatgccatgagc

SEQ ID NO: 570 - protein, 5 aa, Artificial Sequence
  YU535-G09 HCDR1 PRT
SYAMS

SEQ ID NO: 571 - DNA, 51 bp, Artificial Sequence; identical to SEQ ID NO: 131
  YU535-G09 HCDR2 DNA

SEQ ID NO: 572 - protein, 16 aa, Artificial Sequence
  YU535-G09 HCDR2 PRT
AISGSGGSTYYADSVK

SEQ ID NO: 573 - DNA, 33 bp, Artificial Sequence; identical to SEQ ID NO: 553
  YU535-G09 HCDR3 DNA

SEQ ID NO: 574 - protein, 11 aa, Artificial Sequence
  YU535-G09 HCDR3 PRT
GPRGSADYVDY

SEQ ID NO: 575 - DNA, 33 bp, Artificial Sequence; identical to SEQ ID NO: 95
  YU535-G09 LCDR1 DNA

SEQ ID NO: 576 - protein, 11 aa, Artificial Sequence
  YU535-G09 LCDR1 PRT
RASQSISSWLA

SEQ ID NO: 577 - DNA, 21 bp, Artificial Sequence
  YU535-G09 LCDR2 DNA
gatgcctccagtttggaaagt

SEQ ID NO: 578 - protein, 7 aa, Artificial Sequence
  YU535-G09 LCDR2 PRT
DASSLES

SEQ ID NO: 579 - DNA, 27 bp, Artificial Sequence
  YU535-G09 LCDR3 DNA
caacagtataatagttattcgtacact

SEQ ID NO: 580 - protein, 9 aa, Artificial Sequence
  YU535-G09 LCDR3 PRT
QQYNSYSYT

SEQ ID NO: 581 - DNA, 321 bp, Artificial Sequence
  YU535-G09 VL DNA
gacatccagatgacccagtctccttccaccctgtctgcatctgttggagacagagtcaccatcacttgccgggccagtcagagtattagtagctggttggcctggtatcagcagaaaccagggaaagcccctaagctcctgatctatgatgcctccagtttggaaagtggggtcccatcaaggttcagcggcagtggatctgggacagaattcactctcaccatcagcagcctgcagcctgatgattttgcaacttattactgccaacagtataatagttattcgtacacttttggccaggggacacgactggagattaaa

SEQ ID NO: 582 - protein, 107 aa, Artificial Sequence
  YU535-G09 VL PRT
DIQMTQSPSTLSASVGDRVTITCRASQSISSWLAWYQQKPGKAPKLLIYDASSLESGVPSRFSGSGSGTEFTLTISSLQPDDFATYYCQQYNSYSYTFGQGTRLEIK

SEQ ID NO: 583 - DNA, 360 bp, Artificial Sequence; identical to SEQ ID NO: 563
  YU535-G09 VH DNA

SEQ ID NO: 584 - protein, 120 aa, Artificial Sequence; identical to SEQ ID NO: 564
  YU535-G09 VH PRT

SEQ ID NO: 585 - DNA, 1344 bp, Artificial Sequence; identical to SEQ ID NO: 565
  YU535-G09 VH complete DNA

SEQ ID NO: 586 - protein, 448 aa, Artificial Sequence; identical to SEQ ID NO: 566
  YU535-G09 VH complete PRT

SEQ ID NO: 587 - DNA, 642 bp, Artificial Sequence
  YU535-G09 VL complete DNA
gacatccagatgacccagtctccttccaccctgtctgcatctgttggagacagagtcaccatcacttgccgggccagtcagagtattagtagctggttggcctggtatcagcagaaaccagggaaagcccctaagctcctgatctatgatgcctccagtttggaaagtggggtcccatcaaggttcagcggcagtggatctgggacagaattcactctcaccatcagcagcctgcagcctgatgattttgcaacttattactgccaacagtataatagttattcgtacacttttggccaggggacacgactggagattaaacgtacggtggctgcaccatctgtgttcatcttcccgccatctgatgagcagttgaaatctggaactgcctctgttgtgtgcctgctgaataacttctatcccagagaggccaaagtacagtggaaggtggataacgccctccaatcgggtaactcccaggagagtgtcacagagcaggacagcaaggacagcacctacagcctcagcagcaccctgacgctgagcaaagcagactacgagaaacacaaagtctacgcctgcgaagtcacccatcagggcctgagctcgcccgtcacaaagagcttcaacaggggagagtgt

SEQ ID NO: 588 - protein, 214 aa, Artificial Sequence
  YU535-G09 VL complete PRT
DIQMTQSPSTLSASVGDRVTITCRASQSISSWLAWYQQKPGKAPKLLIYDASSLESGVPSRFSGSGSGTEFTLTISSLQPDDFATYYCQQYNSYSYTFGQGTRLEIKRTVAAPSVFIFPPSDEQLKSGTASVVCLLNNFYPREAKVQWKVDNALQSGNSQESVTEQDSKDSTYSLSSTLTLSKADYEKHKVYACEVTHQGLSSPVTKSFNRGEC

SEQ ID NO: 589 - DNA, 15 bp, Artificial Sequence
  YU536-H01 HCDR1 DNA
agctatgccatgagc

SEQ ID NO: 590 - protein, 5 aa, Artificial Sequence
  YU536-H01 HCDR1 PRT
SYAMS

SEQ ID NO: 591 - DNA, 51 bp, Artificial Sequence; identical to SEQ ID NO: 131
  YU536-H01 HCDR2 DNA

SEQ ID NO: 592 - protein, 16 aa, Artificial Sequence
  YU536-H01 HCDR2 PRT
AISGSGGSTYYADSVK

SEQ ID NO: 593 - DNA, 33 bp, Artificial Sequence
  YU536-H01 HCDR3 DNA
ggggtccgatataactccgactactttgactac

SEQ ID NO: 594 - protein, 11 aa, Artificial Sequence
  YU536-H01 HCDR3 PRT
GVRYNSDYFDY

SEQ ID NO: 595 - DNA, 33 bp, Artificial Sequence; identical to SEQ ID NO: 95
  YU536-H01 LCDR1 DNA

SEQ ID NO: 596 - protein, 11 aa, Artificial Sequence
  YU536-H01 LCDR1 PRT
RASQSISSWLA

SEQ ID NO: 597 - DNA, 21 bp, Artificial Sequence
  YU536-H01 LCDR2 DNA
gatgcctccagtttggaaagt

SEQ ID NO: 598 - protein, 7 aa, Artificial Sequence
  YU536-H01 LCDR2 PRT
DASSLES

SEQ ID NO: 599 - DNA, 30 bp, Artificial Sequence
  YU536-H01 LCDR3 DNA
caacagtataatagtgttctcggggtcact

SEQ ID NO: 600 - protein, 10 aa, Artificial Sequence
  YU536-H01 LCDR3 PRT
QQYNSVLGVT

SEQ ID NO: 601 - DNA, 324 bp, Artificial Sequence
  YU536-H01 VL DNA
gacatccagatgacccagtctccttccaccctgtctgcatctgtaggagacagagtcaccatcacttgccgggccagtcagagtattagtagctggttggcctggtatcagcagaaaccagggaaagcccctaagctcctgatctatgatgcctccagtttggaaagtggggtcccatcaaggttcagcggcagtggatctgggacagaattcactctcaccatcagcagcctgcagcctgatgattttgcaacttattactgccaacagtataatagtgttctcggggtcactttcggcggagggaccaagctggagatcaaa

SEQ ID NO: 602 - protein, 108 aa, Artificial Sequence
  YU536-H01 VL PRT
DIQMTQSPSTLSASVGDRVTITCRASQSISSWLAWYQQKPGKAPKLLIYDASSLESGVPSRFSGSGSGTEFTLTISSLQPDDFATYYCQQYNSVLGVTFGGGTKLEIK

SEQ ID NO: 603 - DNA, 360 bp, Artificial Sequence
  YU536-H01 VH DNA
gaggtgcagctgttggagtctgggggaggcttggtacagcctggggggtccctgagactctcctgtgcagcctctggattcacctttagcagctatgccatgagctgggtccgccaggctccagggaaggggctggagtgggtctcagctattagtggtagtggtggtagcacatactacgcagactccgtgaagggccggttcaccatctccagagacaattccaagaacacgctgtatctgcaaatgaacagcctgagagccgaggacacggccgtatattactgtgcgaaaggggtccgatataactccgactactttgactactggggccagggaaccctggtcaccgtgtcctca

SEQ ID NO: 604 - protein, 120 aa, Artificial Sequence
  YU536-H01 VH PRT
EVQLLESGGGLVQPGGSLRLSCAASGFTFSSYAMSWVRQAPGKGLEWVSAISGSGGSTYYADSVKGRFTISRDNSKNTLYLQMNSLRAEDTAVYYCAKGVRYNSDYFDYWGQGTLVTVSS

SEQ ID NO: 605 - DNA, 1344 bp, Artificial Sequence
  YU536-H01 VH complete DNA
gaggtgcagctgttggagtctgggggaggcttggtacagcctggggggtccctgagactctcctgtgcagcctctggattcacctttagcagctatgccatgagctgggtccgccaggctccagggaaggggctggagtgggtctcagctattagtggtagtggtggtagcacatactacgcagactccgtgaagggccggttcaccatctccagagacaattccaagaacacgctgtatctgcaaatgaacagcctgagagccgaggacacggccgtatattactgtgcgaaaggggtccgatataactccgactactttgactactggggccagggaaccctggtcaccgtgtcctcagctagcaccaagggcccatcggtcttccccctggcaccctcctccaagagcacctctgggggcacagcggccctgggctgcctggtcaaggactacttccccgaaccggtgacggtgtcgtggaactcaggcgccctgaccagcggcgtgcacaccttcccggctgtcctacagtcctcaggactctactccctcagcagcgtggtgaccgtgccctccagcagcttgggcacccagacctacatctgcaacgtgaatcacaagcccagcaacaccaaggtggacaagaaagttgagcccaaatcttgtgacaaaactcacacatgcccaccgtgcccagcacctccagtggccggaccgtcagtcttcctcttccccccaaaacccaaggacaccctcatgatctcccggacccctgaggtcacatgcgtggtggtgggcgtgagccacgaagaccctgaggtcaagttcaactggtacgtggacggcgtggaggtgcataatgccaagacaaagccgcgggaggagcagtacaacagcacgtaccgggtggtcagcgtcctcaccgtcctgcaccaggactggctgaatggcaaggagtacaagtgcaaggtctccaacaaacagctcccatcccccatcgagaaaaccatctccaaagccaaagggcagccccgagaaccacaggtgtacaccctgcccccatcccgggatgagctgaccaagaaccaggtcagcctgacctgcctggtcaaaggcttctatcccagcgacatcgccgtggagtgggagagcaatgggcagccggagaacaactacaagaccacgcctcccgtgctggactccgacggctccttcttcctctacagcaagctcaccgtggacaagagcaggtggcagcaggggaacgtcttctcatgctccgtgatgcatgaggctctgcacaaccactacacgcagaaaagcctctccctgtccccgggt

SEQ ID NO: 606 - protein, 448 aa, Artificial Sequence
  YU536-H01 VH complete PRT
EVQLLESGGGLVQPGGSLRLSCAASGFTFSSYAMSWVRQAPGKGLEWVSAISGSGGSTYYADSVKGRFTISRDNSKNTLYLQMNSLRAEDTAVYYCAKGVRYNSDYFDYWGQGTLVTVSSASTKGPSVFPLAPSSKSTSGGTAALGCLVKDYFPEPVTVSWNSGALTSGVHTFPAVLQSSGLYSLSSVVTVPSSSLGTQTYICNVNHKPSNTKVDKKVEPKSCDKTHTCPPCPAPPVAGPSVFLFPPKPKDTLMISRTPEVTCVVVGVSHEDPEVKFNWYVDGVEVHNAKTKPREEQYNSTYRVVSVLTVLHQDWLNGKEYKCKVSNKQLPSPIEKTISKAKGQPREPQVYTLPPSRDELTKNQVSLTCLVKGFYPSDIAVEWESNGQPENNYKTTPPVLDSDGSFFLYSKLTVDKSRWQQGNVFSCSVMHEALHNHYTQKSLSLSPG

SEQ ID NO: 607 - DNA, 645 bp, Artificial Sequence
  YU536-H01 VL complete DNA
gacatccagatgacccagtctccttccaccctgtctgcatctgtaggagacagagtcaccatcacttgccgggccagtcagagtattagtagctggttggcctggtatcagcagaaaccagggaaagcccctaagctcctgatctatgatgcctccagtttggaaagtggggtcccatcaaggttcagcggcagtggatctgggacagaattcactctcaccatcagcagcctgcagcctgatgattttgcaacttattactgccaacagtataatagtgttctcggggtcactttcggcggagggaccaagctggagatcaaacgtacggtggctgcaccatctgtgttcatcttcccgccatctgatgagcagttgaaatctggaactgcctctgttgtgtgcctgctgaataacttctatcccagagaggccaaagtacagtggaaggtggataacgccctccaatcgggtaactcccaggagagtgtcacagagcaggacagcaaggacagcacctacagcctcagcagcaccctgacgctgagcaaagcagactacgagaaacacaaagtctacgcctgcgaagtcacccatcagggcctgagctcgcccgtcacaaagagcttcaacaggggagagtgt

SEQ ID NO: 608 - protein, 215 aa, Artificial Sequence
  YU536-H01 VL complete PRT
DIQMTQSPSTLSASVGDRVTITCRASQSISSWLAWYQQKPGKAPKLLIYDASSLESGVPSRFSGSGSGTEFTLTISSLQPDDFATYYCQQYNSVLGVTFGGGTKLEIKRTVAAPSVFIFPPSDEQLKSGTASVVCLLNNFYPREAKVQWKVDNALQSGNSQESVTEQDSKDSTYSLSSTLTLSKADYEKHKVYACEVTHQGLSSPVTKSFNRGEC

SEQ ID NO: 609 - DNA, 15 bp, Artificial Sequence
  YU536-H05 HCDR1 DNA
agctatgccatgagc

SEQ ID NO: 610 - protein, 5 aa, Artificial Sequence
  YU536-H05 HCDR1 PRT
SYAMS

SEQ ID NO: 611 - DNA, 51 bp, Artificial Sequence; identical to SEQ ID NO: 131
  YU536-H05 HCDR2 DNA

SEQ ID NO: 612 - protein, 16 aa, Artificial Sequence
  YU536-H05 HCDR2 PRT
AISGSGGSTYYADSVK

SEQ ID NO: 613 - DNA, 33 bp, Artificial Sequence
  YU536-H05 HCDR3 DNA
ggggtcagatactcatcagactattttgagtac

SEQ ID NO: 614 - protein, 11 aa, Artificial Sequence
  YU536-H05 HCDR3 PRT
GVRYSSDYFEY

SEQ ID NO: 615 - DNA, 33 bp, Artificial Sequence; identical to SEQ ID NO: 95
  YU536-H05 LCDR1 DNA

SEQ ID NO: 616 - protein, 11 aa, Artificial Sequence
  YU536-H05 LCDR1 PRT
RASQSISSWLA

SEQ ID NO: 617 - DNA, 21 bp, Artificial Sequence
  YU536-H05 LCDR2 DNA
gatgcctccagtttggaaagt

SEQ ID NO: 618 - protein, 7 aa, Artificial Sequence
  YU536-H05 LCDR2 PRT
DASSLES

SEQ ID NO: 619 - DNA, 27 bp, Artificial Sequence
  YU536-H05 LCDR3 DNA
caacagtatgagacttattctcagacg

SEQ ID NO: 620 - protein, 9 aa, Artificial Sequence
  YU536-H05 LCDR3 PRT
QQYETYSQT

SEQ ID NO: 621 - DNA, 321 bp, Artificial Sequence
  YU536-H05 VL DNA
gacatccagttgacccagtctccttccaccctgtctgcatctgtaggagacagagtcaccatcacttgccgggccagtcagagtattagtagctggttggcctggtatcagcagaaaccagggaaagcccctaagctcctgatctatgatgcctccagtttggaaagtggggtcccatcaaggttcagcggcagtggatctgggacagaattcactctcaccatcagcagcctgcagtctgatgattttgcaacttattactgtcaacagtatgagacttattctcagacgttcggccaagggaccaagctggagatcaaa

SEQ ID NO: 622 - protein, 107 aa, Artificial Sequence
  YU536-H05 VL PRT
DIQLTQSPSTLSASVGDRVTITCRASQSISSWLAWYQQKPGKAPKLLIYDASSLESGVPSRFSGSGSGTEFTLTISSLQSDDFATYYCQQYETYSQTFGQGTKLEIK

SEQ ID NO: 623 - DNA, 360 bp, Artificial Sequence
  YU536-H05 VH DNA
gaggtgcagctgttggagtctgggggaggcttggtacagcctggggggtccctgagactctcctgtgcagcctctggattcacctttagcagctatgccatgagctgggtccgccaggctccagggaaggggctggagtgggtctcagctattagtggtagtggtggtagcacatactacgcagactccgtgaagggccggttcaccatctccagagacaattccaagaacacgctgtatctgcaaatgaacagcctgagagccgaggacacggccgtatattactgtgcgaaaggggtcagatactcatcagactattttgagtactggggccagggaaccacggtcaccgtgtcctca

SEQ ID NO: 624 - protein, 120 aa, Artificial Sequence
  YU536-H05 VH PRT
EVQLLESGGGLVQPGGSLRLSCAASGFTFSSYAMSWVRQAPGKGLEWVSAISGSGGSTYYADSVKGRFTISRDNSKNTLYLQMNSLRAEDTAVYYCAKGVRYSSDYFEYWGQGTTVTVSS

SEQ ID NO: 625 - DNA, 1344 bp, Artificial Sequence
  YU536-H05 VH complete DNA
gaggtgcagctgttggagtctgggggaggcttggtacagcctggggggtccctgagactctcctgtgcagcctctggattcacctttagcagctatgccatgagctgggtccgccaggctccagggaaggggctggagtgggtctcagctattagtggtagtggtggtagcacatactacgcagactccgtgaagggccggttcaccatctccagagacaattccaagaacacgctgtatctgcaaatgaacagcctgagagccgaggacacggccgtatattactgtgcgaaaggggtcagatactcatcagactattttgagtactggggccagggaaccacggtcaccgtgtcctcagctagcaccaagggcccatcggtcttccccctggcaccctcctccaagagcacctctgggggcacagcggccctgggctgcctggtcaaggactacttccccgaaccggtgacggtgtcgtggaactcaggcgccctgaccagcggcgtgcacaccttcccggctgtcctacagtcctcaggactctactccctcagcagcgtggtgaccgtgccctccagcagcttgggcacccagacctacatctgcaacgtgaatcacaagcccagcaacaccaaggtggacaagaaagttgagcccaaatcttgtgacaaaactcacacatgcccaccgtgcccagcacctccagtggccggaccgtcagtcttcctcttccccccaaaacccaaggacaccctcatgatctcccggacccctgaggtcacatgcgtggtggtgggcgtgagccacgaagaccctgaggtcaagttcaactggtacgtggacggcgtggaggtgcataatgccaagacaaagccgcgggaggagcagtacaacagcacgtaccgggtggtcagcgtcctcaccgtcctgcaccaggactggctgaatggcaaggagtacaagtgcaaggtctccaacaaacagctcccatcccccatcgagaaaaccatctccaaagccaaagggcagccccgagaaccacaggtgtacaccctgcccccatcccgggatgagctgaccaagaaccaggtcagcctgacctgcctggtcaaaggcttctatcccagcgacatcgccgtggagtgggagagcaatgggcagccggagaacaactacaagaccacgcctcccgtgctggactccgacggctccttcttcctctacagcaagctcaccgtggacaagagcaggtggcagcaggggaacgtcttctcatgctccgtgatgcatgaggctctgcacaaccactacacgcagaaaagcctctccctgtccccgggt

SEQ ID NO: 626 - protein, 448 aa, Artificial Sequence
  YU536-H05 VH complete PRT
EVQLLESGGGLVQPGGSLRLSCAASGFTFSSYAMSWVRQAPGKGLEWVSAISGSGGSTYYADSVKGRFTISRDNSKNTLYLQMNSLRAEDTAVYYCAKGVRYSSDYFEYWGQGTTVTVSSASTKGPSVFPLAPSSKSTSGGTAALGCLVKDYFPEPVTVSWNSGALTSGVHTFPAVLQSSGLYSLSSVVTVPSSSLGTQTYICNVNHKPSNTKVDKKVEPKSCDKTHTCPPCPAPPVAGPSVFLFPPKPKDTLMISRTPEVTCVVVGVSHEDPEVKFNWYVDGVEVHNAKTKPREEQYNSTYRVVSVLTVLHQDWLNGKEYKCKVSNKQLPSPIEKTISKAKGQPREPQVYTLPPSRDELTKNQVSLTCLVKGFYPSDIAVEWESNGQPENNYKTTPPVLDSDGSFFLYSKLTVDKSRWQQGNVFSCSVMHEALHNHYTQKSLSLSPG

SEQ ID NO: 627 - DNA, 642 bp, Artificial Sequence
  YU536-H05 VL complete DNA
gacatccagttgacccagtctccttccaccctgtctgcatctgtaggagacagagtcaccatcacttgccgggccagtcagagtattagtagctggttggcctggtatcagcagaaaccagggaaagcccctaagctcctgatctatgatgcctccagtttggaaagtggggtcccatcaaggttcagcggcagtggatctgggacagaattcactctcaccatcagcagcctgcagtctgatgattttgcaacttattactgtcaacagtatgagacttattctcagacgttcggccaagggaccaagctggagatcaaacgtacggtggctgcaccatctgtgttcatcttcccgccatctgatgagcagttgaaatctggaactgcctctgttgtgtgcctgctgaataacttctatcccagagaggccaaagtacagtggaaggtggataacgccctccaatcgggtaactcccaggagagtgtcacagagcaggacagcaaggacagcacctacagcctcagcagcaccctgacgctgagcaaagcagactacgagaaacacaaagtctacgcctgcgaagtcacccatcagggcctgagctcgcccgtcacaaagagcttcaacaggggagagtgt

SEQ ID NO: 628 - protein, 214 aa, Artificial Sequence
  YU536-H05 VL complete PRT
DIQLTQSPSTLSASVGDRVTITCRASQSISSWLAWYQQKPGKAPKLLIYDASSLESGVPSRFSGSGSGTEFTLTISSLQSDDFATYYCQQYETYSQTFGQGTKLEIKRTVAAPSVFIFPPSDEQLKSGTASVVCLLNNFYPREAKVQWKVDNALQSGNSQESVTEQDSKDSTYSLSSTLTLSKADYEKHKVYACEVTHQGLSSPVTKSFNRGEC

SEQ ID NO: 629 - DNA, 15 bp, Artificial Sequence
  YU535-G02 HCDR1 DNA
agctatgccatgagc

SEQ ID NO: 630 - protein, 5 aa, Artificial Sequence
  YU535-G02 HCDR1 PRT
SYAMS

SEQ ID NO: 631 - DNA, 51 bp, Artificial Sequence; identical to SEQ ID NO: 131
  YU535-G02 HCDR2 DNA

SEQ ID NO: 632 - protein, 16 aa, Artificial Sequence
  YU535-G02 HCDR2 PRT
AISGSGGSTYYADSVK

SEQ ID NO: 633 - DNA, 33 bp, Artificial Sequence
  YU535-G02 HCDR3 DNA
ggtccccgtagtggtactgactactttgactac

SEQ ID NO: 634 - protein, 11 aa, Artificial Sequence
  YU535-G02 HCDR3 PRT
GPRSGTDYFDY

SEQ ID NO: 635 - DNA, 33 bp, Artificial Sequence
  YU535-G02 LCDR1 DNA
cgggccagtgagagtattcggagctggttggcc

SEQ ID NO: 636 - protein, 11 aa, Artificial Sequence
  YU535-G02 LCDR1 PRT
RASESIRSWLA

SEQ ID NO: 637 - DNA, 21 bp, Artificial Sequence
  YU535-G02 LCDR2 DNA
gatgcctccaatttggaaagt

SEQ ID NO: 638 - protein, 7 aa, Artificial Sequence
  YU535-G02 LCDR2 PRT
DASNLES

SEQ ID NO: 639 - DNA, 27 bp, Artificial Sequence
  YU535-G02 LCDR3 DNA
caacagtattatagttatccgctcact

SEQ ID NO: 640 - protein, 9 aa, Artificial Sequence
  YU535-G02 LCDR3 PRT
QQYYSYPLT

SEQ ID NO: 641 - DNA, 321 bp, Artificial Sequence
  YU535-G02 VL DNA
gacatccagatgacccagtctccttccatcctgtctgcatctgtaggagacagagtcaccatcacttgccgggccagtgagagtattcggagctggttggcctggtatcagcagaaggcagggaaagcccctaacctcctaatctatgatgcctccaatttggaaagtggggtcccatcaaggttcagcggcagtggatctgggtcagaattcactctcaccatcagcagcctgcagcctgatgattttgcaacttattactgccaacagtattatagttatccgctcactttcggcggagggaccaaagtggatatcaaa

SEQ ID NO: 642 - protein, 107 aa, Artificial Sequence
  YU535-G02 VL PRT
DIQMTQSPSILSASVGDRVTITCRASESIRSWLAWYQQKAGKAPNLLIYDASNLESGVPSRFSGSGSGSEFTLTISSLQPDDFATYYCQQYYSYPLTFGGGTKVDIK

SEQ ID NO: 643 - DNA, 360 bp, Artificial Sequence
  YU535-G02 VH DNA
caggtgcagctggtggagtctgggggaggcttggtacagcctggggggtccctgagactctcctgtgcagcctctggattcacctttagcagctatgccatgagctgggtccgccaggctccagggaaggggctggagtgggtctcagctattagtggtagtggtggtagcacatactacgcagactccgtgaagggccggttcaccatctccagagacaattccaagaacacgctgtatctgcaaatgaacagcctgagagccgaggacacggccgtatattactgtgcgaaaggtccccgtagtggtactgactactttgactactggggccagggaaccctggtcaccgtgtcctca

SEQ ID NO: 644 - protein, 120 aa, Artificial Sequence
  YU535-G02 VH PRT
QVQLVESGGGLVQPGGSLRLSCAASGFTFSSYAMSWVRQAPGKGLEWVSAISGSGGSTYYADSVKGRFTISRDNSKNTLYLQMNSLRAEDTAVYYCAKGPRSGTDYFDYWGQGTLVTVSS

SEQ ID NO: 645 - DNA, 1344 bp, Artificial Sequence
  YU535-G02 VH complete DNA
caggtgcagctggtggagtctgggggaggcttggtacagcctggggggtccctgagactctcctgtgcagcctctggattcacctttagcagctatgccatgagctgggtccgccaggctccagggaaggggctggagtgggtctcagctattagtggtagtggtggtagcacatactacgcagactccgtgaagggccggttcaccatctccagagacaattccaagaacacgctgtatctgcaaatgaacagcctgagagccgaggacacggccgtatattactgtgcgaaaggtccccgtagtggtactgactactttgactactggggccagggaaccctggtcaccgtgtcctcagctagcaccaagggcccatcggtcttccccctggcaccctcctccaagagcacctctgggggcacagcggccctgggctgcctggtcaaggactacttccccgaaccggtgacggtgtcgtggaactcaggcgccctgaccagcggcgtgcacaccttcccggctgtcctacagtcctcaggactctactccctcagcagcgtggtgaccgtgccctccagcagcttgggcacccagacctacatctgcaacgtgaatcacaagcccagcaacaccaaggtggacaagaaagttgagcccaaatcttgtgacaaaactcacacatgcccaccgtgcccagcacctccagtggccggaccgtcagtcttcctcttccccccaaaacccaaggacaccctcatgatctcccggacccctgaggtcacatgcgtggtggtgggcgtgagccacgaagaccctgaggtcaagttcaactggtacgtggacggcgtggaggtgcataatgccaagacaaagccgcgggaggagcagtacaacagcacgtaccgggtggtcagcgtcctcaccgtcctgcaccaggactggctgaatggcaaggagtacaagtgcaaggtctccaacaaacagctcccatcccccatcgagaaaaccatctccaaagccaaagggcagccccgagaaccacaggtgtacaccctgcccccatcccgggatgagctgaccaagaaccaggtcagcctgacctgcctggtcaaaggcttctatcccagcgacatcgccgtggagtgggagagcaatgggcagccggagaacaactacaagaccacgcctcccgtgctggactccgacggctccttcttcctctacagcaagctcaccgtggacaagagcaggtggcagcaggggaacgtcttctcatgctccgtgatgcatgaggctctgcacaaccactacacgcagaaaagcctctccctgtccccgggt

SEQ ID NO: 646 - protein, 448 aa, Artificial Sequence
  YU535-G02 VH complete PRT
QVQLVESGGGLVQPGGSLRLSCAASGFTFSSYAMSWVRQAPGKGLEWVSAISGSGGSTYYADSVKGRFTISRDNSKNTLYLQMNSLRAEDTAVYYCAKGPRSGTDYFDYWGQGTLVTVSSASTKGPSVFPLAPSSKSTSGGTAALGCLVKDYFPEPVTVSWNSGALTSGVHTFPAVLQSSGLYSLSSVVTVPSSSLGTQTYICNVNHKPSNTKVDKKVEPKSCDKTHTCPPCPAPPVAGPSVFLFPPKPKDTLMISRTPEVTCVVVGVSHEDPEVKFNWYVDGVEVHNAKTKPREEQYNSTYRVVSVLTVLHQDWLNGKEYKCKVSNKQLPSPIEKTISKAKGQPREPQVYTLPPSRDELTKNQVSLTCLVKGFYPSDIAVEWESNGQPENNYKTTPPVLDSDGSFFLYSKLTVDKSRWQQGNVFSCSVMHEALHNHYTQKSLSLSPG

SEQ ID NO: 647 - DNA, 642 bp, Artificial Sequence
  YU535-G02 VL complete DNA
gacatccagatgacccagtctccttccatcctgtctgcatctgtaggagacagagtcaccatcacttgccgggccagtgagagtattcggagctggttggcctggtatcagcagaaggcagggaaagcccctaacctcctaatctatgatgcctccaatttggaaagtggggtcccatcaaggttcagcggcagtggatctgggtcagaattcactctcaccatcagcagcctgcagcctgatgattttgcaacttattactgccaacagtattatagttatccgctcactttcggcggagggaccaaagtggatatcaaacgtacggtggctgcaccatctgtgttcatcttcccgccatctgatgagcagttgaaatctggaactgcctctgttgtgtgcctgctgaataacttctatcccagagaggccaaagtacagtggaaggtggataacgccctccaatcgggtaactcccaggagagtgtcacagagcaggacagcaaggacagcacctacagcctcagcagcaccctgacgctgagcaaagcagactacgagaaacacaaagtctacgcctgcgaagtcacccatcagggcctgagctcgcccgtcacaaagagcttcaacaggggagagtgt

SEQ ID NO: 648 - protein, 214 aa, Artificial Sequence
  YU535-G02 VL complete PRT
DIQMTQSPSILSASVGDRVTITCRASESIRSWLAWYQQKAGKAPNLLIYDASNLESGVPSRFSGSGSGSEFTLTISSLQPDDFATYYCQQYYSYPLTFGGGTKVDIKRTVAAPSVFIFPPSDEQLKSGTASVVCLLNNFYPREAKVQWKVDNALQSGNSQESVTEQDSKDSTYSLSSTLTLSKADYEKHKVYACEVTHQGLSSPVTKSFNRGEC

SEQ ID NO: 649 - DNA, 15 bp, Artificial Sequence
  YU535-G11 HCDR1 DNA
agctatgccatgagc

SEQ ID NO: 650 - protein, 5 aa, Artificial Sequence
  YU535-G11 HCDR1 PRT
SYAMS

SEQ ID NO: 651 - DNA, 51 bp, Artificial Sequence; identical to SEQ ID NO: 131
  YU535-G11 HCDR2 DNA

SEQ ID NO: 652 - protein, 16 aa, Artificial Sequence
  YU535-G11 HCDR2 PRT
AISGSGGSTYYADSVK

SEQ ID NO: 653 - DNA, 33 bp, Artificial Sequence
  YU535-G11 HCDR3 DNA
ggaccgagaagtggctacgactatggggactac

SEQ ID NO: 654 - protein, 11 aa, Artificial Sequence
  YU535-G11 HCDR3 PRT
GPRSGYDYGDY

SEQ ID NO: 655 - DNA, 33 bp, Artificial Sequence
  YU535-G11 LCDR1 DNA
cgggcgagtcagggtattagcagctggttagcc

SEQ ID NO: 656 - protein, 11 aa, Artificial Sequence
  YU535-G11 LCDR1 PRT
RASQGISSWLA

SEQ ID NO: 657 - DNA, 21 bp, Artificial Sequence
  YU535-G11 LCDR2 DNA
gatgcctccagtttggaaagt

SEQ ID NO: 658 - protein, 7 aa, Artificial Sequence
  YU535-G11 LCDR2 PRT
DASSLES

SEQ ID NO: 659 - DNA, 27 bp, Artificial Sequence
  YU535-G11 LCDR3 DNA
caacagtttaatagttaccctctcact

SEQ ID NO: 660 - protein, 9 aa, Artificial Sequence
  YU535-G11 LCDR3 PRT
QQFNSYPLT

SEQ ID NO: 661 - DNA, 321 bp, Artificial Sequence
  YU535-G11 VL DNA
gacatccagttgacccagtctccatcttccgtgtctgcatctgtaggagacagagtcaccatcacttgtcgggcgagtcagggtattagcagctggttagcctggtatcagcagaaaccagggaaagcccctaagctcctgatctatgatgcctccagtttggaaagtggggtcccatcgaggttcagcggcagtggatctgggacagatttcactctcaccatcagcagcctgcagcctgaagattttgcaacttattactgtcaacagtttaatagttaccctctcactttcggcggagggaccaaggtggaaatcaaa

SEQ ID NO: 662 - protein, 107 aa, Artificial Sequence
  YU535-G11 VL PRT
DIQLTQSPSSVSASVGDRVTITCRASQGISSWLAWYQQKPGKAPKLLIYDASSLESGVPSRFSGSGSGTDFTLTISSLQPEDFATYYCQQFNSYPLTFGGGTKVEIK

SEQ ID NO: 663 - DNA, 360 bp, Artificial Sequence
  YU535-G11 VH DNA
gaggtgcagctgttggagtctgggggaggcttggtacagcctggggggtccctgagactctcctgtgcagcctctggattcacctttagcagctatgccatgagctgggtccgccaggctccagggaaggggctggagtgggtctcagctattagtggtagtggtggtagcacatactacgcagactccgtgaagggccggttcaccatctccagagacaattccaagaacacgctgtatctgcaaatgaacagcctgagagccgaggacacggccgtatattactgtgcgaaaggaccgagaagtggctacgactatggggactactggggccagggaaccctggtcaccgtgtcctca

SEQ ID NO: 664 - protein, 120 aa, Artificial Sequence
  YU535-G11 VH PRT
EVQLLESGGGLVQPGGSLRLSCAASGFTFSSYAMSWVRQAPGKGLEWVSAISGSGGSTYYADSVKGRFTISRDNSKNTLYLQMNSLRAEDTAVYYCAKGPRSGYDYGDYWGQGTLVTVSS

SEQ ID NO: 665 - DNA, 1344 bp, Artificial Sequence
  YU535-G11 VH complete DNA
gaggtgcagctgttggagtctgggggaggcttggtacagcctggggggtccctgagactctcctgtgcagcctctggattcacctttagcagctatgccatgagctgggtccgccaggctccagggaaggggctggagtgggtctcagctattagtggtagtggtggtagcacatactacgcagactccgtgaagggccggttcaccatctccagagacaattccaagaacacgctgtatctgcaaatgaacagcctgagagccgaggacacggccgtatattactgtgcgaaaggaccgagaagtggctacgactatggggactactggggccagggaaccctggtcaccgtgtcctcagctagcaccaagggcccatcggtcttccccctggcaccctcctccaagagcacctctgggggcacagcggccctgggctgcctggtcaaggactacttccccgaaccggtgacggtgtcgtggaactcaggcgccctgaccagcggcgtgcacaccttcccggctgtcctacagtcctcaggactctactccctcagcagcgtggtgaccgtgccctccagcagcttgggcacccagacctacatctgcaacgtgaatcacaagcccagcaacaccaaggtggacaagaaagttgagcccaaatcttgtgacaaaactcacacatgcccaccgtgcccagcacctccagtggccggaccgtcagtcttcctcttccccccaaaacccaaggacaccctcatgatctcccggacccctgaggtcacatgcgtggtggtgggcgtgagccacgaagaccctgaggtcaagttcaactggtacgtggacggcgtggaggtgcataatgccaagacaaagccgcgggaggagcagtacaacagcacgtaccgggtggtcagcgtcctcaccgtcctgcaccaggactggctgaatggcaaggagtacaagtgcaaggtctccaacaaacagctcccatcccccatcgagaaaaccatctccaaagccaaagggcagccccgagaaccacaggtgtacaccctgcccccatcccgggatgagctgaccaagaaccaggtcagcctgacctgcctggtcaaaggcttctatcccagcgacatcgccgtggagtgggagagcaatgggcagccggagaacaactacaagaccacgcctcccgtgctggactccgacggctccttcttcctctacagcaagctcaccgtggacaagagcaggtggcagcaggggaacgtcttctcatgctccgtgatgcatgaggctctgcacaaccactacacgcagaaaagcctctccctgtccccgggt

SEQ ID NO: 666 - protein, 448 aa, Artificial Sequence
  YU535-G11 VH complete PRT
EVQLLESGGGLVQPGGSLRLSCAASGFTFSSYAMSWVRQAPGKGLEWVSAISGSGGSTYYADSVKGRFTISRDNSKNTLYLQMNSLRAEDTAVYYCAKGPRSGYDYGDYWGQGTLVTVSSASTKGPSVFPLAPSSKSTSGGTAALGCLVKDYFPEPVTVSWNSGALTSGVHTFPAVLQSSGLYSLSSVVTVPSSSLGTQTYICNVNHKPSNTKVDKKVEPKSCDKTHTCPPCPAPPVAGPSVFLFPPKPKDTLMISRTPEVTCVVVGVSHEDPEVKFNWYVDGVEVHNAKTKPREEQYNSTYRVVSVLTVLHQDWLNGKEYKCKVSNKQLPSPIEKTISKAKGQPREPQVYTLPPSRDELTKNQVSLTCLVKGFYPSDIAVEWESNGQPENNYKTTPPVLDSDGSFFLYSKLTVDKSRWQQGNVFSCSVMHEALHNHYTQKSLSLSPG

SEQ ID NO: 667 - DNA, 642 bp, Artificial Sequence
  YU535-G11 VL complete DNA
gacatccagttgacccagtctccatcttccgtgtctgcatctgtaggagacagagtcaccatcacttgtcgggcgagtcagggtattagcagctggttagcctggtatcagcagaaaccagggaaagcccctaagctcctgatctatgatgcctccagtttggaaagtggggtcccatcgaggttcagcggcagtggatctgggacagatttcactctcaccatcagcagcctgcagcctgaagattttgcaacttattactgtcaacagtttaatagttaccctctcactttcggcggagggaccaaggtggaaatcaaacgtacggtggctgcaccatctgtgttcatcttcccgccatctgatgagcagttgaaatctggaactgcctctgttgtgtgcctgctgaataacttctatcccagagaggccaaagtacagtggaaggtggataacgccctccaatcgggtaactcccaggagagtgtcacagagcaggacagcaaggacagcacctacagcctcagcagcaccctgacgctgagcaaagcagactacgagaaacacaaagtctacgcctgcgaagtcacccatcagggcctgagctcgcccgtcacaaagagcttcaacaggggagagtgt

SEQ ID NO: 668 - protein, 214 aa, Artificial Sequence
  YU535-G11 VL complete PRT
DIQLTQSPSSVSASVGDRVTITCRASQGISSWLAWYQQKPGKAPKLLIYDASSLESGVPSRFSGSGSGTDFTLTISSLQPEDFATYYCQQFNSYPLTFGGGTKVEIKRTVAAPSVFIFPPSDEQLKSGTASVVCLLNNFYPREAKVQWKVDNALQSGNSQESVTEQDSKDSTYSLSSTLTLSKADYEKHKVYACEVTHQGLSSPVTKSFNRGEC

SEQ ID NO: 669 - DNA, 15 bp, Artificial Sequence
  YU534-B11 HCDR1 DNA
agctatgccatgagc

SEQ ID NO: 670 - protein, 5 aa, Artificial Sequence
  YU534-B11 HCDR1 PRT
SYAMS

SEQ ID NO: 671 - DNA, 51 bp, Artificial Sequence; identical to SEQ ID NO: 131
  YU534-B11 HCDR2 DNA

SEQ ID NO: 672 - protein, 16 aa, Artificial Sequence
  YU534-B11 HCDR2 PRT
AISGSGGSTYYADSVK

SEQ ID NO: 673 - DNA, 57 bp, Artificial Sequence
  YU534-B11 HCDR3 DNA
tcggtgggttactatgatagtagtggttattatcactttggggactactttgactac

SEQ ID NO: 674 - protein, 19 aa, Artificial Sequence
  YU534-B11 HCDR3 PRT
SVGYYDSSGYYHFGDYFDY

SEQ ID NO: 675 - DNA, 42 bp, Artificial Sequence; identical to SEQ ID NO: 235
  YU534-B11 LCDR1 DNA

SEQ ID NO: 676 - protein, 14 aa, Artificial Sequence
  YU534-B11 LCDR1 PRT
TGSSSNIGAGYDVH

SEQ ID NO: 677 - DNA, 21 bp, Artificial Sequence
  YU534-B11 LCDR2 DNA
ggtaacagcaatcggccctca

SEQ ID NO: 678 - protein, 7 aa, Artificial Sequence
  YU534-B11 LCDR2 PRT
GNSNRPS

SEQ ID NO: 679 - DNA, 33 bp, Artificial Sequence; identical to SEQ ID NO: 499
  YU534-B11 LCDR3 DNA

SEQ ID NO: 680 - protein, 11 aa, Artificial Sequence
  YU534-B11 LCDR3 PRT
QSYDSSLSGSV

SEQ ID NO: 681 - DNA, 333 bp, Artificial Sequence
  YU534-B11 VL DNA
cagtctgtgttgacgcagccgccctcagtgtctggggccccagggcagagggtcaccatctcctgcactgggagcagctccaacatcggggcaggttatgatgtacactggtaccagcagcttccaggaacagcccccaaactcctcatctatggtaacagcaatcggccctcaggggtccctgaccgattctctggctccaagtctggcacctcagcctccctggccatcactgggctccaggctgaggatgaggctgattattactgccagtcctatgacagcagcctgagtggttcggtattcggcggagggaccaagctgaccgtccta

SEQ ID NO: 682 - protein, 111 aa, Artificial Sequence
  YU534-B11 VL PRT
QSVLTQPPSVSGAPGQRVTISCTGSSSNIGAGYDVHWYQQLPGTAPKLLIYGNSNRPSGVPDRFSGSKSGTSASLAITGLQAEDEADYYCQSYDSSLSGSVFGGGTKLTVL

SEQ ID NO: 683 - DNA, 384 bp, Artificial Sequence
  YU534-B11 VH DNA
gaggtgcagctggtgcagtctgggggaggcttggtacagcctggggggtccctgagactctcctgtgcagcctctggattcacctttagcagctatgccatgagctgggtccgccaggctccagggaaggggctggagtgggtctcagctattagtggtagtggtggtagcacatactacgcagactccgtgaagggccggttcaccatctccagagacaattccaagaacacgctgtatctgcaaatgaacagcctgagagccgaggacacggccgtatattactgtgcccgctcggtgggttactatgatagtagtggttattatcactttggggactactttgactactggggccagggaaccctggtcaccgtgtcctca

SEQ ID NO: 684 - protein, 128 aa, Artificial Sequence
  YU534-B11 VH PRT
EVQLVQSGGGLVQPGGSLRLSCAASGFTFSSYAMSWVRQAPGKGLEWVSAISGSGGSTYYADSVKGRFTISRDNSKNTLYLQMNSLRAEDTAVYYCARSVGYYDSSGYYHFGDYFDYWGQGTLVTVSS

SEQ ID NO: 685 - DNA, 1368 bp, Artificial Sequence
  YU534-B11 VH complete DNA
gaggtgcagctggtgcagtctgggggaggcttggtacagcctggggggtccctgagactctcctgtgcagcctctggattcacctttagcagctatgccatgagctgggtccgccaggctccagggaaggggctggagtgggtctcagctattagtggtagtggtggtagcacatactacgcagactccgtgaagggccggttcaccatctccagagacaattccaagaacacgctgtatctgcaaatgaacagcctgagagccgaggacacggccgtatattactgtgcccgctcggtgggttactatgatagtagtggttattatcactttggggactactttgactactggggccagggaaccctggtcaccgtgtcctcagctagcaccaagggcccatcggtcttccccctggcaccctcctccaagagcacctctgggggcacagcggccctgggctgcctggtcaaggactacttccccgaaccggtgacggtgtcgtggaactcaggcgccctgaccagcggcgtgcacaccttcccggctgtcctacagtcctcaggactctactccctcagcagcgtggtgaccgtgccctccagcagcttgggcacccagacctacatctgcaacgtgaatcacaagcccagcaacaccaaggtggacaagaaagttgagcccaaatcttgtgacaaaactcacacatgcccaccgtgcccagcacctccagtggccggaccgtcagtcttcctcttccccccaaaacccaaggacaccctcatgatctcccggacccctgaggtcacatgcgtggtggtgggcgtgagccacgaagaccctgaggtcaagttcaactggtacgtggacggcgtggaggtgcataatgccaagacaaagccgcgggaggagcagtacaacagcacgtaccgggtggtcagcgtcctcaccgtcctgcaccaggactggctgaatggcaaggagtacaagtgcaaggtctccaacaaacagctcccatcccccatcgagaaaaccatctccaaagccaaagggcagccccgagaaccacaggtgtacaccctgcccccatcccgggatgagctgaccaagaaccaggtcagcctgacctgcctggtcaaaggcttctatcccagcgacatcgccgtggagtgggagagcaatgggcagccggagaacaactacaagaccacgcctcccgtgctggactccgacggctccttcttcctctacagcaagctcaccgtggacaagagcaggtggcagcaggggaacgtcttctcatgctccgtgatgcatgaggctctgcacaaccactacacgcagaaaagcctctccctgtccccgggt

SEQ ID NO: 686 - protein, 456 aa, Artificial Sequence
  YU534-B11 VH complete PRT
EVQLVQSGGGLVQPGGSLRLSCAASGFTFSSYAMSWVRQAPGKGLEWVSAISGSGGSTYYADSVKGRFTISRDNSKNTLYLQMNSLRAEDTAVYYCARSVGYYDSSGYYHFGDYFDYWGQGTLVTVSSASTKGPSVFPLAPSSKSTSGGTAALGCLVKDYFPEPVTVSWNSGALTSGVHTFPAVLQSSGLYSLSSVVTVPSSSLGTQTYICNVNHKPSNTKVDKKVEPKSCDKTHTCPPCPAPPVAGPSVFLFPPKPKDTLMISRTPEVTCVVVGVSHEDPEVKFNWYVDGVEVHNAKTKPREEQYNSTYRVVSVLTVLHQDWLNGKEYKCKVSNKQLPSPIEKTISKAKGQPREPQVYTLPPSRDELTKNQVSLTCLVKGFYPSDIAVEWESNGQPENNYKTTPPVLDSDGSFFLYSKLTVDKSRWQQGNVFSCSVMHEALHNHYTQKSLSLSPG

SEQ ID NO: 687 - DNA, 651 bp, Artificial Sequence
  YU534-B11 VL complete DNA
cagtctgtgttgacgcagccgccctcagtgtctggggccccagggcagagggtcaccatctcctgcactgggagcagctccaacatcggggcaggttatgatgtacactggtaccagcagcttccaggaacagcccccaaactcctcatctatggtaacagcaatcggccctcaggggtccctgaccgattctctggctccaagtctggcacctcagcctccctggccatcactgggctccaggctgaggatgaggctgattattactgccagtcctatgacagcagcctgagtggttcggtattcggcggagggaccaagctgaccgtcctaggtcagcccaaggctgcaccaagtgtcactctgttcccgccctcctctgaggagcttcaagccaacaaggccacactggtgtgtctcataagtgacttctacccgggagccgtgacagtggcctggaaggcagatagcagccccgtcaaggcgggagtggagaccaccacaccctccaaacaaagcaacaacaagtacgcggccagcagctatctgagcctgacgcctgagcagtggaagtcccacagaagctacagctgccaggtcacgcatgaagggagcaccgtggagaagacagtggcccctacagaatgttca

SEQ ID NO: 688 - protein, 217 aa, Artificial Sequence
  YU534-B11 VL complete PRT
QSVLTQPPSVSGAPGQRVTISCTGSSSNIGAGYDVHWYQQLPGTAPKLLIYGNSNRPSGVPDRFSGSKSGTSASLAITGLQAEDEADYYCQSYDSSLSGSVFGGGTKLTVLGQPKAAPSVTLFPPSSEELQANKATLVCLISDFYPGAVTVAWKADSSPVKAGVETTTPSKQSNNKYAASSYLSLTPEQWKSHRSYSCQVTHEGSTVEKTVAPTECS

SEQ ID NO: 689 - DNA, 15 bp, Artificial Sequence
  YU534-C10 HCDR1 DNA
agctatgccatgagc

SEQ ID NO: 690 - protein, 5 aa, Artificial Sequence
  YU534-C10 HCDR1 PRT
SYAMS

SEQ ID NO: 691 - DNA, 51 bp, Artificial Sequence; identical to SEQ ID NO: 131
  YU534-C10 HCDR2 DNA

SEQ ID NO: 692 - protein, 16 aa, Artificial Sequence
  YU534-C10 HCDR2 PRT
AISGSGGSTYYADSVK

SEQ ID NO: 693 - DNA, 57 bp, Artificial Sequence; identical to SEQ ID NO: 673
  YU534-C10 HCDR3 DNA

SEQ ID NO: 694 - protein, 19 aa, Artificial Sequence
  YU534-C10 HCDR3 PRT
SVGYYDSSGYYHFGDYFDY

SEQ ID NO: 695 - DNA, 42 bp, Artificial Sequence; identical to SEQ ID NO: 235
  YU534-C10 LCDR1 DNA

SEQ ID NO: 696 - protein, 14 aa, Artificial Sequence
  YU534-C10 LCDR1 PRT
TGSSSNIGAGYDVH

SEQ ID NO: 697 - DNA, 21 bp, Artificial Sequence
  YU534-C10 LCDR2 DNA
ggtaacagcaatcggccctca

SEQ ID NO: 698 - protein, 7 aa, Artificial Sequence
  YU534-C10 LCDR2 PRT
GNSNRPS

SEQ ID NO: 699 - DNA, 33 bp, Artificial Sequence
  YU534-C10 LCDR3 DNA
cagtcctatgacagcagcctgagtggagtggta

SEQ ID NO: 700 - protein, 11 aa, Artificial Sequence
  YU534-C10 LCDR3 PRT
QSYDSSLSGVV

SEQ ID NO: 701 - DNA, 333 bp, Artificial Sequence
  YU534-C10 VL DNA
cagtctgtgttgacgcagccgccctcagtgtctggggccccagggcagagggtcaccatctcctgcactgggagcagctccaacatcggggcaggttatgatgtacactggtaccagcagcttccaggaacagcccccaaactcctcatctatggtaacagcaatcggccctcaggggtccctgaccgattctctggctccaagtctggcacctcagcctccctggccatcactgggctccaggctgaggatgaggctgattattactgccagtcctatgacagcagcctgagtggagtggtattcggcggagggaccaagctgaccgtccta

SEQ ID NO: 702 - protein, 111 aa, Artificial Sequence
  YU534-C10 VL PRT
QSVLTQPPSVSGAPGQRVTISCTGSSSNIGAGYDVHWYQQLPGTAPKLLIYGNSNRPSGVPDRFSGSKSGTSASLAITGLQAEDEADYYCQSYDSSLSGVVFGGGTKLTVL

SEQ ID NO: 703 - DNA, 384 bp, Artificial Sequence
  YU534-C10 VH DNA
caggttcagctggtgcagtctgggggaggcttggtacagcctggggggtccctgagactctcctgtgcagcctctggattcacctttagcagctatgccatgagctgggtccgccaggctccagggaaggggctggagtgggtctcagctattagtggtagtggtggtagcacatactacgcagactccgtgaagggccggttcaccatctccagagacaattccaagaacacgctgtatctgcaaatgaacagcctgagagccgaggacacggccgtatattactgtgcccgctcggtgggttactatgatagtagtggttattatcactttggggactactttgactactggggccagggaaccctggtcaccgtgtcctca

SEQ ID NO: 704 - protein, 128 aa, Artificial Sequence
  YU534-C10 VH PRT
QVQLVQSGGGLVQPGGSLRLSCAASGFTFSSYAMSWVRQAPGKGLEWVSAISGSGGSTYYADSVKGRFTISRDNSKNTLYLQMNSLRAEDTAVYYCARSVGYYDSSGYYHFGDYFDYWGQGTLVTVSS

SEQ ID NO: 705 - DNA, 1368 bp, Artificial Sequence
  YU534-C10 VH complete DNA
caggttcagctggtgcagtctgggggaggcttggtacagcctggggggtccctgagactctcctgtgcagcctctggattcacctttagcagctatgccatgagctgggtccgccaggctccagggaaggggctggagtgggtctcagctattagtggtagtggtggtagcacatactacgcagactccgtgaagggccggttcaccatctccagagacaattccaagaacacgctgtatctgcaaatgaacagcctgagagccgaggacacggccgtatattactgtgcccgctcggtgggttactatgatagtagtggttattatcactttggggactactttgactactggggccagggaaccctggtcaccgtgtcctcagctagcaccaagggcccatcggtcttccccctggcaccctcctccaagagcacctctgggggcacagcggccctgggctgcctggtcaaggactacttccccgaaccggtgacggtgtcgtggaactcaggcgccctgaccagcggcgtgcacaccttcccggctgtcctacagtcctcaggactctactccctcagcagcgtggtgaccgtgccctccagcagcttgggcacccagacctacatctgcaacgtgaatcacaagcccagcaacaccaaggtggacaagaaagttgagcccaaatcttgtgacaaaactcacacatgcccaccgtgcccagcacctccagtggccggaccgtcagtcttcctcttccccccaaaacccaaggacaccctcatgatctcccggacccctgaggtcacatgcgtggtggtgggcgtgagccacgaagaccctgaggtcaagttcaactggtacgtggacggcgtggaggtgcataatgccaagacaaagccgcgggaggagcagtacaacagcacgtaccgggtggtcagcgtcctcaccgtcctgcaccaggactggctgaatggcaaggagtacaagtgcaaggtctccaacaaacagctcccatcccccatcgagaaaaccatctccaaagccaaagggcagccccgagaaccacaggtgtacaccctgcccccatcccgggatgagctgaccaagaaccaggtcagcctgacctgcctggtcaaaggcttctatcccagcgacatcgccgtggagtgggagagcaatgggcagccggagaacaactacaagaccacgcctcccgtgctggactccgacggctccttcttcctctacagcaagctcaccgtggacaagagcaggtggcagcaggggaacgtcttctcatgctccgtgatgcatgaggctctgcacaaccactacacgcagaaaagcctctccctgtccccgggt

SEQ ID NO: 706 - protein, 456 aa, Artificial Sequence
  YU534-C10 VH complete PRT
QVQLVQSGGGLVQPGGSLRLSCAASGFTFSSYAMSWVRQAPGKGLEWVSAISGSGGSTYYADSVKGRFTISRDNSKNTLYLQMNSLRAEDTAVYYCARSVGYYDSSGYYHFGDYFDYWGQGTLVTVSSASTKGPSVFPLAPSSKSTSGGTAALGCLVKDYFPEPVTVSWNSGALTSGVHTFPAVLQSSGLYSLSSVVTVPSSSLGTQTYICNVNHKPSNTKVDKKVEPKSCDKTHTCPPCPAPPVAGPSVFLFPPKPKDTLMISRTPEVTCVVVGVSHEDPEVKFNWYVDGVEVHNAKTKPREEQYNSTYRVVSVLTVLHQDWLNGKEYKCKVSNKQLPSPIEKTISKAKGQPREPQVYTLPPSRDELTKNQVSLTCLVKGFYPSDIAVEWESNGQPENNYKTTPPVLDSDGSFFLYSKLTVDKSRWQQGNVFSCSVMHEALHNHYTQKSLSLSPG

SEQ ID NO: 707 - DNA, 651 bp, Artificial Sequence
  YU534-C10 VL complete DNA
cagtctgtgttgacgcagccgccctcagtgtctggggccccagggcagagggtcaccatctcctgcactgggagcagctccaacatcggggcaggttatgatgtacactggtaccagcagcttccaggaacagcccccaaactcctcatctatggtaacagcaatcggccctcaggggtccctgaccgattctctggctccaagtctggcacctcagcctccctggccatcactgggctccaggctgaggatgaggctgattattactgccagtcctatgacagcagcctgagtggagtggtattcggcggagggaccaagctgaccgtcctaggtcagcccaaggctgcaccaagtgtcactctgttcccgccctcctctgaggagcttcaagccaacaaggccacactggtgtgtctcataagtgacttctacccgggagccgtgacagtggcctggaaggcagatagcagccccgtcaaggcgggagtggagaccaccacaccctccaaacaaagcaacaacaagtacgcggccagcagctatctgagcctgacgcctgagcagtggaagtcccacagaagctacagctgccaggtcacgcatgaagggagcaccgtggagaagacagtggcccctacagaatgttca

SEQ ID NO: 708 - protein, 217 aa, Artificial Sequence
  YU534-C10 VL complete PRT
QSVLTQPPSVSGAPGQRVTISCTGSSSNIGAGYDVHWYQQLPGTAPKLLIYGNSNRPSGVPDRFSGSKSGTSASLAITGLQAEDEADYYCQSYDSSLSGVVFGGGTKLTVLGQPKAAPSVTLFPPSSEELQANKATLVCLISDFYPGAVTVAWKADSSPVKAGVETTTPSKQSNNKYAASSYLSLTPEQWKSHRSYSCQVTHEGSTVEKTVAPTECS

SEQ ID NO: 709 - DNA, 15 bp, Artificial Sequence
  YU535-D10 HCDR1 DNA
agctactggatcggc

SEQ ID NO: 710 - protein, 5 aa, Artificial Sequence
  YU535-D10 HCDR1 PRT
SYWIG

SEQ ID NO: 711 - DNA, 51 bp, Artificial Sequence
  YU535-D10 HCDR2 DNA
atcatctatcctggtgactctgataccagatacagcccgtccttccaaggc

SEQ ID NO: 712 - protein, 16 aa, Artificial Sequence
  YU535-D10 HCDR2 PRT
IIYPGDSDTRYSPSFQ

SEQ ID NO: 713 - DNA, 42 bp, Artificial Sequence
  YU535-D10 HCDR3 DNA
caaaattactatgatagtagtggttattactactttgactac

SEQ ID NO: 714 - protein, 14 aa, Artificial Sequence
  YU535-D10 HCDR3 PRT
QNYYDSSGYYYFDY

SEQ ID NO: 715 - DNA, 33 bp, Artificial Sequence; identical to SEQ ID NO: 15
  YU535-D10 LCDR1 DNA

SEQ ID NO: 716 - protein, 11 aa, Artificial Sequence
  YU535-D10 LCDR1 PRT
RASQSISSYLN

SEQ ID NO: 717 - DNA, 21 bp, Artificial Sequence
  YU535-D10 LCDR2 DNA
gctgcatccagtttgcaaagt

SEQ ID NO: 718 - protein, 7 aa, Artificial Sequence
  YU535-D10 LCDR2 PRT
AASSLQS

SEQ ID NO: 719 - DNA, 30 bp, Artificial Sequence
  YU535-D10 LCDR3 DNA
caacagagttacagtacccattcgtggacg

SEQ ID NO: 720 - protein, 10 aa, Artificial Sequence
  YU535-D10 LCDR3 PRT
QQSYSTHSWT

SEQ ID NO: 721 - DNA, 324 bp, Artificial Sequence
  YU535-D10 VL DNA
gacatccagttgacccagtctccatcctccctgtctgcatctgtaggagacagagtcaccatcacttgccgggcaagtcagagcattagcagctatttaaattggtatcagcagaaaccagggaaagcccctaagctcctgatctatgctgcatccagtttgcaaagtggggtcccatcaaggttcagtggcagtggatctgggacagatttcactctcaccatcagcagtctgcaacctgaagattttgcaacttactactgtcaacagagttacagtacccattcgtggacgttcggccaagggaccaaagtggatatcaaa

SEQ ID NO: 722 - protein, 108 aa, Artificial Sequence
  YU535-D10 VL PRT
DIQLTQSPSSLSASVGDRVTITCRASQSISSYLNWYQQKPGKAPKLLIYAASSLQSGVPSRFSGSGSGTDFTLTISSLQPEDFATYYCQQSYSTHSWTFGQGTKVDIK

SEQ ID NO: 723 - DNA, 369 bp, Artificial Sequence
  YU535-D10 VH DNA
caggttcagctggtgcagtctggagcagaggtgaaaaagcccggggagtctctgaagatctcctgtaagggttctggatacagctttaccagctactggatcggctgggtgcgccagatgcccgggaaaggcctggagtggatggggatcatctatcctggtgactctgataccagatacagcccgtccttccaaggccaggtcaccatctcagccgacaagtccatcagcaccgcctacctgcagtggagcagcctgaaggcctcggacaccgccatgtattactgtgcgagccaaaattactatgatagtagtggttattactactttgactactggggccagggaaccctggtcaccgtgtcctca

SEQ ID NO: 724 - protein, 123 aa, Artificial Sequence
  YU535-D10 VH PRT
QVQLVQSGAEVKKPGESLKISCKGSGYSFTSYWIGWVRQMPGKGLEWMGIIYPGDSDTRYSPSFQGQVTISADKSISTAYLQWSSLKASDTAMYYCASQNYYDSSGYYYFDYWGQGTLVTVSS

SEQ ID NO: 725 - DNA, 1353 bp, Artificial Sequence
  YU535-D10 VH complete DNA
caggttcagctggtgcagtctggagcagaggtgaaaaagcccggggagtctctgaagatctcctgtaagggttctggatacagctttaccagctactggatcggctgggtgcgccagatgcccgggaaaggcctggagtggatggggatcatctatcctggtgactctgataccagatacagcccgtccttccaaggccaggtcaccatctcagccgacaagtccatcagcaccgcctacctgcagtggagcagcctgaaggcctcggacaccgccatgtattactgtgcgagccaaaattactatgatagtagtggttattactactttgactactggggccagggaaccctggtcaccgtgtcctcagctagcaccaagggcccatcggtcttccccctggcaccctcctccaagagcacctctgggggcacagcggccctgggctgcctggtcaaggactacttccccgaaccggtgacggtgtcgtggaactcaggcgccctgaccagcggcgtgcacaccttcccggctgtcctacagtcctcaggactctactccctcagcagcgtggtgaccgtgccctccagcagcttgggcacccagacctacatctgcaacgtgaatcacaagcccagcaacaccaaggtggacaagaaagttgagcccaaatcttgtgacaaaactcacacatgcccaccgtgcccagcacctccagtggccggaccgtcagtcttcctcttccccccaaaacccaaggacaccctcatgatctcccggacccctgaggtcacatgcgtggtggtgggcgtgagccacgaagaccctgaggtcaagttcaactggtacgtggacggcgtggaggtgcataatgccaagacaaagccgcgggaggagcagtacaacagcacgtaccgggtggtcagcgtcctcaccgtcctgcaccaggactggctgaatggcaaggagtacaagtgcaaggtctccaacaaacagctcccatcccccatcgagaaaaccatctccaaagccaaagggcagccccgagaaccacaggtgtacaccctgcccccatcccgggatgagctgaccaagaaccaggtcagcctgacctgcctggtcaaaggcttctatcccagcgacatcgccgtggagtgggagagcaatgggcagccggagaacaactacaagaccacgcctcccgtgctggactccgacggctccttcttcctctacagcaagctcaccgtggacaagagcaggtggcagcaggggaacgtcttctcatgctccgtgatgcatgaggctctgcacaaccactacacgcagaaaagcctctccctgtccccgggt

SEQ ID NO: 726 - protein, 451 aa, Artificial Sequence
  YU535-D10 VH complete PRT
QVQLVQSGAEVKKPGESLKISCKGSGYSFTSYWIGWVRQMPGKGLEWMGIIYPGDSDTRYSPSFQGQVTISADKSISTAYLQWSSLKASDTAMYYCASQNYYDSSGYYYFDYWGQGTLVTVSSASTKGPSVFPLAPSSKSTSGGTAALGCLVKDYFPEPVTVSWNSGALTSGVHTFPAVLQSSGLYSLSSVVTVPSSSLGTQTYICNVNHKPSNTKVDKKVEPKSCDKTHTCPPCPAPPVAGPSVFLFPPKPKDTLMISRTPEVTCVVVGVSHEDPEVKFNWYVDGVEVHNAKTKPREEQYNSTYRVVSVLTVLHQDWLNGKEYKCKVSNKQLPSPIEKTISKAKGQPREPQVYTLPPSRDELTKNQVSLTCLVKGFYPSDIAVEWESNGQPENNYKTTPPVLDSDGSFFLYSKLTVDKSRWQQGNVFSCSVMHEALHNHYTQKSLSLSPG

SEQ ID NO: 727 - DNA, 645 bp, Artificial Sequence
  YU535-D10 VL complete DNA
gacatccagttgacccagtctccatcctccctgtctgcatctgtaggagacagagtcaccatcacttgccgggcaagtcagagcattagcagctatttaaattggtatcagcagaaaccagggaaagcccctaagctcctgatctatgctgcatccagtttgcaaagtggggtcccatcaaggttcagtggcagtggatctgggacagatttcactctcaccatcagcagtctgcaacctgaagattttgcaacttactactgtcaacagagttacagtacccattcgtggacgttcggccaagggaccaaagtggatatcaaacgtacggtggctgcaccatctgtgttcatcttcccgccatctgatgagcagttgaaatctggaactgcctctgttgtgtgcctgctgaataacttctatcccagagaggccaaagtacagtggaaggtggataacgccctccaatcgggtaactcccaggagagtgtcacagagcaggacagcaaggacagcacctacagcctcagcagcaccctgacgctgagcaaagcagactacgagaaacacaaagtctacgcctgcgaagtcacccatcagggcctgagctcgcccgtcacaaagagcttcaacaggggagagtgt

SEQ ID NO: 728 - protein, 215 aa, Artificial Sequence
  YU535-D10 VL complete PRT
DIQLTQSPSSLSASVGDRVTITCRASQSISSYLNWYQQKPGKAPKLLIYAASSLQSGVPSRFSGSGSGTDFTLTISSLQPEDFATYYCQQSYSTHSWTFGQGTKVDIKRTVAAPSVFIFPPSDEQLKSGTASVVCLLNNFYPREAKVQWKVDNALQSGNSQESVTEQDSKDSTYSLSSTLTLSKADYEKHKVYACEVTHQGLSSPVTKSFNRGEC

SEQ ID NO: 729 - DNA, 15 bp, Artificial Sequence
  YU535-B02 HCDR1 DNA
agctactggatcggc

SEQ ID NO: 730 - protein, 5 aa, Artificial Sequence
  YU535-B02 HCDR1 PRT
SYWIG

SEQ ID NO: 731 - DNA, 51 bp, Artificial Sequence; identical to SEQ ID NO: 711
  YU535-B02 HCDR2 DNA

SEQ ID NO: 732 - protein, 16 aa, Artificial Sequence
  YU535-B02 HCDR2 PRT
IIYPGDSDTRYSPSFQ

SEQ ID NO: 733 - DNA, 27 bp, Artificial Sequence
  YU535-B02 HCDR3 DNA
agtcggagtagtgactactttgactac

SEQ ID NO: 734 - protein, 9 aa, Artificial Sequence
  YU535-B02 HCDR3 PRT
SRSSDYFDY

SEQ ID NO: 735 - DNA, 33 bp, Artificial Sequence; identical to SEQ ID NO: 655
  YU535-B02 LCDR1 DNA

SEQ ID NO: 736 - protein, 11 aa, Artificial Sequence
  YU535-B02 LCDR1 PRT
RASQGISSWLA

SEQ ID NO: 737 - DNA, 21 bp, Artificial Sequence
  YU535-B02 LCDR2 DNA
gatgcatccaatttggaaaca

SEQ ID NO: 738 - protein, 7 aa, Artificial Sequence
  YU535-B02 LCDR2 PRT
DASNLET

SEQ ID NO: 739 - DNA, 27 bp, Artificial Sequence
  YU535-B02 LCDR3 DNA
caacagtatgataatctccctgtcact

SEQ ID NO: 740 - protein, 9 aa, Artificial Sequence
  YU535-B02 LCDR3 PRT
QQYDNLPVT

SEQ ID NO: 741 - DNA, 321 bp, Artificial Sequence
  YU535-B02 VL DNA
gacatccagttgacccagtctccatcttccgtgtctgcatctgtaggagacagagtcaccatcacttgtcgggcgagtcagggtattagcagctggttagcctggtatcagcagaaaccagggaaagcccctaagctcctgatctacgatgcatccaatttggaaacaggggtcccatcaaggttcagtggaagtggatctgggacagattttactttcaccatcagcagcctgcagcctgaagatattgcaacatattactgtcaacagtatgataatctccctgtcactttcggcggagggaccaaagtggatatcaaa

SEQ ID NO: 742 - protein, 107 aa, Artificial Sequence
  YU535-B02 VL PRT
DIQLTQSPSSVSASVGDRVTITCRASQGISSWLAWYQQKPGKAPKLLIYDASNLETGVPSRFSGSGSGTDFTFTISSLQPEDIATYYCQQYDNLPVTFGGGTKVDIK

SEQ ID NO: 743 - DNA, 354 bp, Artificial Sequence
  YU535-B02 VH DNA
gaggtgcagctggtgcagtctggagcagaggtgaaaaagcccggggagtctctgaagatctcctgtaagggttctggatacagctttaccagctactggatcggctgggtgcgccagatgcccgggaaaggcctggagtggatggggatcatctatcctggtgactctgataccagatacagcccgtccttccaaggccaggtcaccatctcagccgacaagtccatcagcaccgcctacctgcagtggagcagcctgaaggcctcggacaccgccatgtattactgtgcgagaagtcggagtagtgactactttgactactggggccagggaaccacggtcaccgtgtcctca

SEQ ID NO: 744 - protein, 118 aa, Artificial Sequence
  YU535-B02 VH PRT
EVQLVQSGAEVKKPGESLKISCKGSGYSFTSYWIGWVRQMPGKGLEWMGIIYPGDSDTRYSPSFQGQVTISADKSISTAYLQWSSLKASDTAMYYCARSRSSDYFDYWGQGTTVTVSS

SEQ ID NO: 745 - DNA, 1338 bp, Artificial Sequence
  YU535-B02 VH complete DNA
gaggtgcagctggtgcagtctggagcagaggtgaaaaagcccggggagtctctgaagatctcctgtaagggttctggatacagctttaccagctactggatcggctgggtgcgccagatgcccgggaaaggcctggagtggatggggatcatctatcctggtgactctgataccagatacagcccgtccttccaaggccaggtcaccatctcagccgacaagtccatcagcaccgcctacctgcagtggagcagcctgaaggcctcggacaccgccatgtattactgtgcgagaagtcggagtagtgactactttgactactggggccagggaaccacggtcaccgtgtcctcagctagcaccaagggcccatcggtcttccccctggcaccctcctccaagagcacctctgggggcacagcggccctgggctgcctggtcaaggactacttccccgaaccggtgacggtgtcgtggaactcaggcgccctgaccagcggcgtgcacaccttcccggctgtcctacagtcctcaggactctactccctcagcagcgtggtgaccgtgccctccagcagcttgggcacccagacctacatctgcaacgtgaatcacaagcccagcaacaccaaggtggacaagaaagttgagcccaaatcttgtgacaaaactcacacatgcccaccgtgcccagcacctccagtggccggaccgtcagtcttcctcttccccccaaaacccaaggacaccctcatgatctcccggacccctgaggtcacatgcgtggtggtgggcgtgagccacgaagaccctgaggtcaagttcaactggtacgtggacggcgtggaggtgcataatgccaagacaaagccgcgggaggagcagtacaacagcacgtaccgggtggtcagcgtcctcaccgtcctgcaccaggactggctgaatggcaaggagtacaagtgcaaggtctccaacaaacagctcccatcccccatcgagaaaaccatctccaaagccaaagggcagccccgagaaccacaggtgtacaccctgcccccatcccgggatgagctgaccaagaaccaggtcagcctgacctgcctggtcaaaggcttctatcccagcgacatcgccgtggagtgggagagcaatgggcagccggagaacaactacaagaccacgcctcccgtgctggactccgacggctccttcttcctctacagcaagctcaccgtggacaagagcaggtggcagcaggggaacgtcttctcatgctccgtgatgcatgaggctctgcacaaccactacacgcagaaaagcctctccctgtccccgggt

SEQ ID NO: 746 - protein, 446 aa, Artificial Sequence
  YU535-B02 VH complete PRT
EVQLVQSGAEVKKPGESLKISCKGSGYSFTSYWIGWVRQMPGKGLEWMGIIYPGDSDTRYSPSFQGQVTISADKSISTAYLQWSSLKASDTAMYYCARSRSSDYFDYWGQGTTVTVSSASTKGPSVFPLAPSSKSTSGGTAALGCLVKDYFPEPVTVSWNSGALTSGVHTFPAVLQSSGLYSLSSVVTVPSSSLGTQTYICNVNHKPSNTKVDKKVEPKSCDKTHTCPPCPAPPVAGPSVFLFPPKPKDTLMISRTPEVTCVVVGVSHEDPEVKFNWYVDGVEVHNAKTKPREEQYNSTYRVVSVLTVLHQDWLNGKEYKCKVSNKQLPSPIEKTISKAKGQPREPQVYTLPPSRDELTKNQVSLTCLVKGFYPSDIAVEWESNGQPENNYKTTPPVLDSDGSFFLYSKLTVDKSRWQQGNVFSCSVMHEALHNHYTQKSLSLSPG

SEQ ID NO: 747 - DNA, 642 bp, Artificial Sequence
  YU535-B02 VL complete DNA
gacatccagttgacccagtctccatcttccgtgtctgcatctgtaggagacagagtcaccatcacttgtcgggcgagtcagggtattagcagctggttagcctggtatcagcagaaaccagggaaagcccctaagctcctgatctacgatgcatccaatttggaaacaggggtcccatcaaggttcagtggaagtggatctgggacagattttactttcaccatcagcagcctgcagcctgaagatattgcaacatattactgtcaacagtatgataatctccctgtcactttcggcggagggaccaaagtggatatcaaacgtacggtggctgcaccatctgtgttcatcttcccgccatctgatgagcagttgaaatctggaactgcctctgttgtgtgcctgctgaataacttctatcccagagaggccaaagtacagtggaaggtggataacgccctccaatcgggtaactcccaggagagtgtcacagagcaggacagcaaggacagcacctacagcctcagcagcaccctgacgctgagcaaagcagactacgagaaacacaaagtctacgcctgcgaagtcacccatcagggcctgagctcgcccgtcacaaagagcttcaacaggggagagtgt

SEQ ID NO: 748 - protein, 214 aa, Artificial Sequence
  YU535-B02 VL complete PRT
DIQLTQSPSSVSASVGDRVTITCRASQGISSWLAWYQQKPGKAPKLLIYDASNLETGVPSRFSGSGSGTDFTFTISSLQPEDIATYYCQQYDNLPVTFGGGTKVDIKRTVAAPSVFIFPPSDEQLKSGTASVVCLLNNFYPREAKVQWKVDNALQSGNSQESVTEQDSKDSTYSLSSTLTLSKADYEKHKVYACEVTHQGLSSPVTKSFNRGEC

SEQ ID NO: 749 - DNA, 15 bp, Artificial Sequence
  YU534-D07 HCDR1 DNA
agctactggatcggc

SEQ ID NO: 750 - protein, 5 aa, Artificial Sequence
  YU534-D07 HCDR1 PRT
SYWIG

SEQ ID NO: 751 - DNA, 51 bp, Artificial Sequence; identical to SEQ ID NO: 711
  YU534-D07 HCDR2 DNA

SEQ ID NO: 752 - protein, 16 aa, Artificial Sequence
  YU534-D07 HCDR2 PRT
IIYPGDSDTRYSPSFQ

SEQ ID NO: 753 - DNA, 24 bp, Artificial Sequence
  YU534-D07 HCDR3 DNA
tataacagtggctggcttgactac

SEQ ID NO: 754 - protein, 8 aa, Artificial Sequence
  YU534-D07 HCDR3 PRT
YNSGWLDY

SEQ ID NO: 755 - DNA, 39 bp, Artificial Sequence
  YU534-D07 LCDR1 DNA
tctggaagcagctccaacatcggaagtaatcctgtaaac

SEQ ID NO: 756 - protein, 13 aa, Artificial Sequence
  YU534-D07 LCDR1 PRT
SGSSSNIGSNPVN

SEQ ID NO: 757 - DNA, 21 bp, Artificial Sequence
  YU534-D07 LCDR2 DNA
agtaataatcagcggccctca

SEQ ID NO: 758 - protein, 7 aa, Artificial Sequence
  YU534-D07 LCDR2 PRT
SNNQRPS

SEQ ID NO: 759 - DNA, 36 bp, Artificial Sequence
  YU534-D07 LCDR3 DNA
gcagcatgggatgacagcctgaatggtaatgtgtta

SEQ ID NO: 760 - protein, 12 aa, Artificial Sequence
  YU534-D07 LCDR3 PRT
AAWDDSLNGNVL

SEQ ID NO: 761 - DNA, 333 bp, Artificial Sequence
  YU534-D07 VL DNA
cagtctgtgctgactcagccaccctcagcgtctgggacccccgggcagagggtcaccatctcttgttctggaagcagctccaacatcggaagtaatcctgtaaactggtaccagcagctcccaggaacggcccccaaactcctcatctatagtaataatcagcggccctcaggggtccctgaccgattctctggctccaagtctggcacctcagcctccctggccatcagtggactccagtctgaggatgaggctgactattactgtgcagcatgggatgacagcctgaatggtaatgtgttatttggcggagggaccaagctgaccgtccta

SEQ ID NO: 762 - protein, 111 aa, Artificial Sequence
  YU534-D07 VL PRT
QSVLTQPPSASGTPGQRVTISCSGSSSNIGSNPVNWYQQLPGTAPKLLIYSNNQRPSGVPDRFSGSKSGTSASLAISGLQSEDEADYYCAAWDDSLNGNVLFGGGTKLTVL

SEQ ID NO: 763 - DNA, 351 bp, Artificial Sequence
  YU534-D07 VH DNA
gaggtgcagctggtgcagtctggagcagaggtgaaaaagcccggggagtctctgaagatctcctgtaagggttctggatacagctttaccagctactggatcggctgggtgcgccagatgcccgggaaaggcctggagtggatggggatcatctatcctggtgactctgataccagatacagcccgtccttccaaggccaggtcaccatctcagccgacaagtccatcagcaccgcctacctgcagtggagcagcctgaaggcctcggacaccgccatgtattactgtgctaggtataacagtggctggcttgactactggggccagggaaccacggtcaccgtgtcctca

SEQ ID NO: 764 - protein, 117 aa, Artificial Sequence
  YU534-D07 VH PRT
EVQLVQSGAEVKKPGESLKISCKGSGYSFTSYWIGWVRQMPGKGLEWMGIIYPGDSDTRYSPSFQGQVTISADKSISTAYLQWSSLKASDTAMYYCARYNSGWLDYWGQGTTVTVSS

SEQ ID NO: 765 - DNA, 1335 bp, Artificial Sequence
  YU534-D07 VH complete DNA
gaggtgcagctggtgcagtctggagcagaggtgaaaaagcccggggagtctctgaagatctcctgtaagggttctggatacagctttaccagctactggatcggctgggtgcgccagatgcccgggaaaggcctggagtggatggggatcatctatcctggtgactctgataccagatacagcccgtccttccaaggccaggtcaccatctcagccgacaagtccatcagcaccgcctacctgcagtggagcagcctgaaggcctcggacaccgccatgtattactgtgctaggtataacagtggctggcttgactactggggccagggaaccacggtcaccgtgtcctcagctagcaccaagggcccatcggtcttccccctggcaccctcctccaagagcacctctgggggcacagcggccctgggctgcctggtcaaggactacttccccgaaccggtgacggtgtcgtggaactcaggcgccctgaccagcggcgtgcacaccttcccggctgtcctacagtcctcaggactctactccctcagcagcgtggtgaccgtgccctccagcagcttgggcacccagacctacatctgcaacgtgaatcacaagcccagcaacaccaaggtggacaagaaagttgagcccaaatcttgtgacaaaactcacacatgcccaccgtgcccagcacctccagtggccggaccgtcagtcttcctcttccccccaaaacccaaggacaccctcatgatctcccggacccctgaggtcacatgcgtggtggtgggcgtgagccacgaagaccctgaggtcaagttcaactggtacgtggacggcgtggaggtgcataatgccaagacaaagccgcgggaggagcagtacaacagcacgtaccgggtggtcagcgtcctcaccgtcctgcaccaggactggctgaatggcaaggagtacaagtgcaaggtctccaacaaacagctcccatcccccatcgagaaaaccatctccaaagccaaagggcagccccgagaaccacaggtgtacaccctgcccccatcccgggatgagctgaccaagaaccaggtcagcctgacctgcctggtcaaaggcttctatcccagcgacatcgccgtggagtgggagagcaatgggcagccggagaacaactacaagaccacgcctcccgtgctggactccgacggctccttcttcctctacagcaagctcaccgtggacaagagcaggtggcagcaggggaacgtcttctcatgctccgtgatgcatgaggctctgcacaaccactacacgcagaaaagcctctccctgtccccgggt

SEQ ID NO: 766 - protein, 445 aa, Artificial Sequence
  YU534-D07 VH complete PRT
EVQLVQSGAEVKKPGESLKISCKGSGYSFTSYWIGWVRQMPGKGLEWMGIIYPGDSDTRYSPSFQGQVTISADKSISTAYLQWSSLKASDTAMYYCARYNSGWLDYWGQGTTVTVSSASTKGPSVFPLAPSSKSTSGGTAALGCLVKDYFPEPVTVSWNSGALTSGVHTFPAVLQSSGLYSLSSVVTVPSSSLGTQTYICNVNHKPSNTKVDKKVEPKSCDKTHTCPPCPAPPVAGPSVFLFPPKPKDTLMISRTPEVTCVVVGVSHEDPEVKFNWYVDGVEVHNAKTKPREEQYNSTYRVVSVLTVLHQDWLNGKEYKCKVSNKQLPSPIEKTISKAKGQPREPQVYTLPPSRDELTKNQVSLTCLVKGFYPSDIAVEWESNGQPENNYKTTPPVLDSDGSFFLYSKLTVDKSRWQQGNVFSCSVMHEALHNHYTQKSLSLSPG

SEQ ID NO: 767 - DNA, 651 bp, Artificial Sequence
  YU534-D07 VL complete DNA
cagtctgtgctgactcagccaccctcagcgtctgggacccccgggcagagggtcaccatctcttgttctggaagcagctccaacatcggaagtaatcctgtaaactggtaccagcagctcccaggaacggcccccaaactcctcatctatagtaataatcagcggccctcaggggtccctgaccgattctctggctccaagtctggcacctcagcctccctggccatcagtggactccagtctgaggatgaggctgactattactgtgcagcatgggatgacagcctgaatggtaatgtgttatttggcggagggaccaagctgaccgtcctaggtcagcccaaggctgcaccaagtgtcactctgttcccgccctcctctgaggagcttcaagccaacaaggccacactggtgtgtctcataagtgacttctacccgggagccgtgacagtggcctggaaggcagatagcagccccgtcaaggcgggagtggagaccaccacaccctccaaacaaagcaacaacaagtacgcggccagcagctatctgagcctgacgcctgagcagtggaagtcccacagaagctacagctgccaggtcacgcatgaagggagcaccgtggagaagacagtggcccctacagaatgttca

SEQ ID NO: 768 - protein, 217 aa, Artificial Sequence
  YU534-D07 VL complete PRT
QSVLTQPPSASGTPGQRVTISCSGSSSNIGSNPVNWYQQLPGTAPKLLIYSNNQRPSGVPDRFSGSKSGTSASLAISGLQSEDEADYYCAAWDDSLNGNVLFGGGTKLTVLGQPKAAPSVTLFPPSSEELQANKATLVCLISDFYPGAVTVAWKADSSPVKAGVETTTPSKQSNNKYAASSYLSLTPEQWKSHRSYSCQVTHEGSTVEKTVAPTECS

SEQ ID NO: 769 - DNA, 15 bp, Artificial Sequence
  YU537-H08 HCDR1 DNA
agctactatatgcac

SEQ ID NO: 770 - protein, 5 aa, Artificial Sequence
  YU537-H08 HCDR1 PRT
SYYMH

SEQ ID NO: 771 - DNA, 51 bp, Artificial Sequence; identical to SEQ ID NO: 171
  YU537-H08 HCDR2 DNA

SEQ ID NO: 772 - protein, 16 aa, Artificial Sequence
  YU537-H08 HCDR2 PRT
IINPSGGSTSYAQKFQ

SEQ ID NO: 773 - DNA, 57 bp, Artificial Sequence
  YU537-H08 HCDR3 DNA
gcgagtcgggattactatgatagtagtggttatttgcgtcgaatggggggcgactac

SEQ ID NO: 774 - protein, 19 aa, Artificial Sequence
  YU537-H08 HCDR3 PRT
ASRDYYDSSGYLRRMGGDY

SEQ ID NO: 775 - DNA, 33 bp, Artificial Sequence
  YU537-H08 LCDR1 DNA
gggggaaacaacattggaagtaaaagtgtgcac

SEQ ID NO: 776 - protein, 11 aa, Artificial Sequence
  YU537-H08 LCDR1 PRT
GGNNIGSKSVH

SEQ ID NO: 777 - DNA, 21 bp, Artificial Sequence
  YU537-H08 LCDR2 DNA
gatgatagcgaccggccctca

SEQ ID NO: 778 - protein, 7 aa, Artificial Sequence
  YU537-H08 LCDR2 PRT
DDSDRPS

SEQ ID NO: 779 - DNA, 27 bp, Artificial Sequence
  YU537-H08 LCDR3 DNA
caggtgtgggacagcagcactgcggta

SEQ ID NO: 780 - protein, 9 aa, Artificial Sequence
  YU537-H08 LCDR3 PRT
QVWDSSTAV

SEQ ID NO: 781 - DNA, 318 bp, Artificial Sequence
  YU537-H08 VL DNA
cagtctgtgctgactcagccaccctcggtgtcagtggccccaggacagacggccaggattacctgtgggggaaacaacattggaagtaaaagtgtgcactggtaccagcagaagccaggccaggcccctgtgctggtcgtctatgatgatagcgaccggccctcagggatccctgagcgattctctggctccaactctgggaacacggccaccctgaccatcagcagggtcgaagccggggatgaggccgactattactgtcaggtgtgggacagcagcactgcggtattcggcggagggaccaagctgaccgtccta

SEQ ID NO: 782 - protein, 106 aa, Artificial Sequence
  YU537-H08 VL PRT
QSVLTQPPSVSVAPGQTARITCGGNNIGSKSVHWYQQKPGQAPVLVVYDDSDRPSGIPERFSGSNSGNTATLTISRVEAGDEADYYCQVWDSSTAVFGGGTKLTVL

SEQ ID NO: 783 - DNA, 384 bp, Artificial Sequence
  YU537-H08 VH DNA
gaggtgcagctggtggagtctggggctgaggtgaagaagcctggggcctcagtgaaggtttcctgcaaggcatctggatacaccttcaccagctactatatgcactgggtgcgacaggcccctggacaagggcttgagtggatgggaataatcaaccctagtggtggtagcacaagctacgcacagaagttccagggcagagtcaccatgaccagggacacgtccacgagcacagtctacatggagctgagcagcctgagatctgaggacacggccgtgtattactgtgctagagcgagtcgggattactatgatagtagtggttatttgcgtcgaatggggggcgactactggggccagggaaccctggtcaccgtgtcctca

SEQ ID NO: 784 - protein, 128 aa, Artificial Sequence
  YU537-H08 VH PRT
EVQLVESGAEVKKPGASVKVSCKASGYTFTSYYMHWVRQAPGQGLEWMGIINPSGGSTSYAQKFQGRVTMTRDTSTSTVYMELSSLRSEDTAVYYCARASRDYYDSSGYLRRMGGDYWGQGTLVTVSS

SEQ ID NO: 785 - DNA, 1368 bp, Artificial Sequence
  YU537-H08 VH complete DNA
gaggtgcagctggtggagtctggggctgaggtgaagaagcctggggcctcagtgaaggtttcctgcaaggcatctggatacaccttcaccagctactatatgcactgggtgcgacaggcccctggacaagggcttgagtggatgggaataatcaaccctagtggtggtagcacaagctacgcacagaagttccagggcagagtcaccatgaccagggacacgtccacgagcacagtctacatggagctgagcagcctgagatctgaggacacggccgtgtattactgtgctagagcgagtcgggattactatgatagtagtggttatttgcgtcgaatggggggcgactactggggccagggaaccctggtcaccgtgtcctcagctagcaccaagggcccatcggtcttccccctggcaccctcctccaagagcacctctgggggcacagcggccctgggctgcctggtcaaggactacttccccgaaccggtgacggtgtcgtggaactcaggcgccctgaccagcggcgtgcacaccttcccggctgtcctacagtcctcaggactctactccctcagcagcgtggtgaccgtgccctccagcagcttgggcacccagacctacatctgcaacgtgaatcacaagcccagcaacaccaaggtggacaagaaagttgagcccaaatcttgtgacaaaactcacacatgcccaccgtgcccagcacctccagtggccggaccgtcagtcttcctcttccccccaaaacccaaggacaccctcatgatctcccggacccctgaggtcacatgcgtggtggtgggcgtgagccacgaagaccctgaggtcaagttcaactggtacgtggacggcgtggaggtgcataatgccaagacaaagccgcgggaggagcagtacaacagcacgtaccgggtggtcagcgtcctcaccgtcctgcaccaggactggctgaatggcaaggagtacaagtgcaaggtctccaacaaacagctcccatcccccatcgagaaaaccatctccaaagccaaagggcagccccgagaaccacaggtgtacaccctgcccccatcccgggatgagctgaccaagaaccaggtcagcctgacctgcctggtcaaaggcttctatcccagcgacatcgccgtggagtgggagagcaatgggcagccggagaacaactacaagaccacgcctcccgtgctggactccgacggctccttcttcctctacagcaagctcaccgtggacaagagcaggtggcagcaggggaacgtcttctcatgctccgtgatgcatgaggctctgcacaaccactacacgcagaaaagcctctccctgtccccgggt

SEQ ID NO: 786 - protein, 456 aa, Artificial Sequence
  YU537-H08 VH complete PRT
EVQLVESGAEVKKPGASVKVSCKASGYTFTSYYMHWVRQAPGQGLEWMGIINPSGGSTSYAQKFQGRVTMTRDTSTSTVYMELSSLRSEDTAVYYCARASRDYYDSSGYLRRMGGDYWGQGTLVTVSSASTKGPSVFPLAPSSKSTSGGTAALGCLVKDYFPEPVTVSWNSGALTSGVHTFPAVLQSSGLYSLSSVVTVPSSSLGTQTYICNVNHKPSNTKVDKKVEPKSCDKTHTCPPCPAPPVAGPSVFLFPPKPKDTLMISRTPEVTCVVVGVSHEDPEVKFNWYVDGVEVHNAKTKPREEQYNSTYRVVSVLTVLHQDWLNGKEYKCKVSNKQLPSPIEKTISKAKGQPREPQVYTLPPSRDELTKNQVSLTCLVKGFYPSDIAVEWESNGQPENNYKTTPPVLDSDGSFFLYSKLTVDKSRWQQGNVFSCSVMHEALHNHYTQKSLSLSPG

SEQ ID NO: 787 - DNA, 636 bp, Artificial Sequence
  YU537-H08 VL complete DNA
cagtctgtgctgactcagccaccctcggtgtcagtggccccaggacagacggccaggattacctgtgggggaaacaacattggaagtaaaagtgtgcactggtaccagcagaagccaggccaggcccctgtgctggtcgtctatgatgatagcgaccggccctcagggatccctgagcgattctctggctccaactctgggaacacggccaccctgaccatcagcagggtcgaagccggggatgaggccgactattactgtcaggtgtgggacagcagcactgcggtattcggcggagggaccaagctgaccgtcctaggtcagcccaaggctgcaccaagtgtcactctgttcccgccctcctctgaggagcttcaagccaacaaggccacactggtgtgtctcataagtgacttctacccgggagccgtgacagtggcctggaaggcagatagcagccccgtcaaggcgggagtggagaccaccacaccctccaaacaaagcaacaacaagtacgcggccagcagctatctgagcctgacgcctgagcagtggaagtcccacagaagctacagctgccaggtcacgcatgaagggagcaccgtggagaagacagtggcccctacagaatgttca

SEQ ID NO: 788 - protein, 212 aa, Artificial Sequence
  YU537-H08 VL complete PRT
QSVLTQPPSVSVAPGQTARITCGGNNIGSKSVHWYQQKPGQAPVLVVYDDSDRPSGIPERFSGSNSGNTATLTISRVEAGDEADYYCQVWDSSTAVFGGGTKLTVLGQPKAAPSVTLFPPSSEELQANKATLVCLISDFYPGAVTVAWKADSSPVKAGVETTTPSKQSNNKYAASSYLSLTPEQWKSHRSYSCQVTHEGSTVEKTVAPTECS

SEQ ID NO: 789 - DNA, 15 bp, Artificial Sequence
  YU534-E01 HCDR1 DNA
acctatgccatgggc

SEQ ID NO: 790 - protein, 5 aa, Artificial Sequence
  YU534-E01 HCDR1 PRT
TYAMG

SEQ ID NO: 791 - DNA, 51 bp, Artificial Sequence
  YU534-E01 HCDR2 DNA
actattagtggtactggtggtatcacatactacgcagactccgtgaagggc

SEQ ID NO: 792 - protein, 16 aa, Artificial Sequence
  YU534-E01 HCDR2 PRT
TISGTGGITYYADSVK

SEQ ID NO: 793 - DNA, 57 bp, Artificial Sequence
  YU534-E01 HCDR3 DNA
gtcggagataattactatgataggagtggtaattatcacatggactactttgactac

SEQ ID NO: 794 - protein, 19 aa, Artificial Sequence
  YU534-E01 HCDR3 PRT
VGDNYYDRSGNYHMDYFDY

SEQ ID NO: 795 - DNA, 39 bp, Artificial Sequence; identical to SEQ ID NO: 395
  YU534-E01 LCDR1 DNA

SEQ ID NO: 796 - protein, 13 aa, Artificial Sequence
  YU534-E01 LCDR1 PRT
SGSSSNIGNNYVS

SEQ ID NO: 797 - DNA, 21 bp, Artificial Sequence
  YU534-E01 LCDR2 DNA
gaagataatgagcgaccctca

SEQ ID NO: 798 - protein, 7 aa, Artificial Sequence
  YU534-E01 LCDR2 PRT
EDNERPS

SEQ ID NO: 799 - DNA, 33 bp, Artificial Sequence
  YU534-E01 LCDR3 DNA
ggaacatgggatagcagcctgagtgttatgtta

SEQ ID NO: 800 - protein, 11 aa, Artificial Sequence
  YU534-E01 LCDR3 PRT
GTWDSSLSVML

SEQ ID NO: 801 - DNA, 330 bp, Artificial Sequence
  YU534-E01 VL DNA
cagtctgtgttgacgccgccgccctcagtgtctgcggccccaggacagaaggtcaccatctcctgctctggaagcagctccaacattgggaataattatgtatcctggtaccaacacctcccaggaacagcccccaaactcctcatctatgaagataatgagcgaccctcagggattcctgaccgattctctggctccaagtctggcacgtccgccaccctgggcatcaccggactccagactggggacgagggcgatttttactgcggaacatgggatagcagcctgagtgttatgttattcggcggagggaccaagctgaccgtccta

SEQ ID NO: 802 - protein, 110 aa, Artificial Sequence
  YU534-E01 VL PRT
QSVLTPPPSVSAAPGQKVTISCSGSSSNIGNNYVSWYQHLPGTAPKLLIYEDNERPSGIPDRFSGSKSGTSATLGITGLQTGDEGDFYCGTWDSSLSVMLFGGGTKLTVL

SEQ ID NO: 803 - DNA, 384 bp, Artificial Sequence
  YU534-E01 VH DNA
caggtgcagctggtgcagtctgggggaggcttggtacagcctggggggtccctgagactctcctgtgcagcctctggattcacctttagcacctatgccatgggctgggtccgccaggctccagggaaggggctggagtgggtctcaactattagtggtactggtggtatcacatactacgcagactccgtgaagggccggttcaccatctccagagacaattccaagaacacgctgtatctgcaaatgaacagcctgagagccgaggacacggccgtatattactgtgcgaaagtcggagataattactatgataggagtggtaattatcacatggactactttgactactggggccagggaaccctggtcaccgtgtcctca

SEQ ID NO: 804 - protein, 128 aa, Artificial Sequence
  YU534-E01 VH PRT
QVQLVQSGGGLVQPGGSLRLSCAASGFTFSTYAMGWVRQAPGKGLEWVSTISGTGGITYYADSVKGRFTISRDNSKNTLYLQMNSLRAEDTAVYYCAKVGDNYYDRSGNYHMDYFDYWGQGTLVTVSS

SEQ ID NO: 805 - DNA, 1368 bp, Artificial Sequence
  YU534-E01 VH complete DNA
caggtgcagctggtgcagtctgggggaggcttggtacagcctggggggtccctgagactctcctgtgcagcctctggattcacctttagcacctatgccatgggctgggtccgccaggctccagggaaggggctggagtgggtctcaactattagtggtactggtggtatcacatactacgcagactccgtgaagggccggttcaccatctccagagacaattccaagaacacgctgtatctgcaaatgaacagcctgagagccgaggacacggccgtatattactgtgcgaaagtcggagataattactatgataggagtggtaattatcacatggactactttgactactggggccagggaaccctggtcaccgtgtcctcagctagcaccaagggcccatcggtcttccccctggcaccctcctccaagagcacctctgggggcacagcggccctgggctgcctggtcaaggactacttccccgaaccggtgacggtgtcgtggaactcaggcgccctgaccagcggcgtgcacaccttcccggctgtcctacagtcctcaggactctactccctcagcagcgtggtgaccgtgccctccagcagcttgggcacccagacctacatctgcaacgtgaatcacaagcccagcaacaccaaggtggacaagaaagttgagcccaaatcttgtgacaaaactcacacatgcccaccgtgcccagcacctccagtggccggaccgtcagtcttcctcttccccccaaaacccaaggacaccctcatgatctcccggacccctgaggtcacatgcgtggtggtgggcgtgagccacgaagaccctgaggtcaagttcaactggtacgtggacggcgtggaggtgcataatgccaagacaaagccgcgggaggagcagtacaacagcacgtaccgggtggtcagcgtcctcaccgtcctgcaccaggactggctgaatggcaaggagtacaagtgcaaggtctccaacaaacagctcccatcccccatcgagaaaaccatctccaaagccaaagggcagccccgagaaccacaggtgtacaccctgcccccatcccgggatgagctgaccaagaaccaggtcagcctgacctgcctggtcaaaggcttctatcccagcgacatcgccgtggagtgggagagcaatgggcagccggagaacaactacaagaccacgcctcccgtgctggactccgacggctccttcttcctctacagcaagctcaccgtggacaagagcaggtggcagcaggggaacgtcttctcatgctccgtgatgcatgaggctctgcacaaccactacacgcagaaaagcctctccctgtccccgggt

SEQ ID NO: 806 - protein, 456 aa, Artificial Sequence
  YU534-E01 VH complete PRT
QVQLVQSGGGLVQPGGSLRLSCAASGFTFSTYAMGWVRQAPGKGLEWVSTISGTGGITYYADSVKGRFTISRDNSKNTLYLQMNSLRAEDTAVYYCAKVGDNYYDRSGNYHMDYFDYWGQGTLVTVSSASTKGPSVFPLAPSSKSTSGGTAALGCLVKDYFPEPVTVSWNSGALTSGVHTFPAVLQSSGLYSLSSVVTVPSSSLGTQTYICNVNHKPSNTKVDKKVEPKSCDKTHTCPPCPAPPVAGPSVFLFPPKPKDTLMISRTPEVTCVVVGVSHEDPEVKFNWYVDGVEVHNAKTKPREEQYNSTYRVVSVLTVLHQDWLNGKEYKCKVSNKQLPSPIEKTISKAKGQPREPQVYTLPPSRDELTKNQVSLTCLVKGFYPSDIAVEWESNGQPENNYKTTPPVLDSDGSFFLYSKLTVDKSRWQQGNVFSCSVMHEALHNHYTQKSLSLSPG

SEQ ID NO: 807 - DNA, 648 bp, Artificial Sequence
  YU534-E01 VL complete DNA
cagtctgtgttgacgccgccgccctcagtgtctgcggccccaggacagaaggtcaccatctcctgctctggaagcagctccaacattgggaataattatgtatcctggtaccaacacctcccaggaacagcccccaaactcctcatctatgaagataatgagcgaccctcagggattcctgaccgattctctggctccaagtctggcacgtccgccaccctgggcatcaccggactccagactggggacgagggcgatttttactgcggaacatgggatagcagcctgagtgttatgttattcggcggagggaccaagctgaccgtcctaggtcagcccaaggctgcaccaagtgtcactctgttcccgccctcctctgaggagcttcaagccaacaaggccacactggtgtgtctcataagtgacttctacccgggagccgtgacagtggcctggaaggcagatagcagccccgtcaaggcgggagtggagaccaccacaccctccaaacaaagcaacaacaagtacgcggccagcagctatctgagcctgacgcctgagcagtggaagtcccacagaagctacagctgccaggtcacgcatgaagggagcaccgtggagaagacagtggcccctacagaatgttca

SEQ ID NO: 808 - protein, 216 aa, Artificial Sequence
  YU534-E01 VL complete PRT
QSVLTPPPSVSAAPGQKVTISCSGSSSNIGNNYVSWYQHLPGTAPKLLIYEDNERPSGIPDRFSGSKSGTSATLGITGLQTGDEGDFYCGTWDSSLSVMLFGGGTKLTVLGQPKAAPSVTLFPPSSEELQANKATLVCLISDFYPGAVTVAWKADSSPVKAGVETTTPSKQSNNKYAASSYLSLTPEQWKSHRSYSCQVTHEGSTVEKTVAPTECS

SEQ ID NO: 809 - DNA, 15 bp, Artificial Sequence
  YU534-C02 HCDR1 DNA
acctatgccatgagc

SEQ ID NO: 810 - protein, 5 aa, Artificial Sequence
  YU534-C02 HCDR1 PRT
TYAMS

SEQ ID NO: 811 - DNA, 51 bp, Artificial Sequence; identical to SEQ ID NO: 791
  YU534-C02 HCDR2 DNA

SEQ ID NO: 812 - protein, 16 aa, Artificial Sequence
  YU534-C02 HCDR2 PRT
TISGTGGITYYADSVK

SEQ ID NO: 813 - DNA, 57 bp, Artificial Sequence; identical to SEQ ID NO: 793
  YU534-C02 HCDR3 DNA

SEQ ID NO: 814 - protein, 19 aa, Artificial Sequence
  YU534-C02 HCDR3 PRT
VGDNYYDRSGNYHMDYFDY

SEQ ID NO: 815 - DNA, 42 bp, Artificial Sequence
  YU534-C02 LCDR1 DNA
actgggagcagctccaacatcggggcagcttatgatgtacac

SEQ ID NO: 816 - protein, 14 aa, Artificial Sequence
  YU534-C02 LCDR1 PRT
TGSSSNIGAAYDVH

SEQ ID NO: 817 - DNA, 21 bp, Artificial Sequence
  YU534-C02 LCDR2 DNA
gaaaacaacaagcggccctca

SEQ ID NO: 818 - protein, 7 aa, Artificial Sequence
  YU534-C02 LCDR2 PRT
ENNKRPS

SEQ ID NO: 819 - DNA, 27 bp, Artificial Sequence
  YU534-C02 LCDR3 DNA
ggaacgtgggatggcagcctgagtgtt

SEQ ID NO: 820 - protein, 9 aa, Artificial Sequence
  YU534-C02 LCDR3 PRT
GTWDGSLSV

SEQ ID NO: 821 - DNA, 327 bp, Artificial Sequence
  YU534-C02 VL DNA
cagtctgtgttgacgcagccgccctcagtgtctggggccccagggcagagggtcaccatctcctgcactgggagcagctccaacatcggggcagcttatgatgtacactggtaccagcagcttccaggaacggcccccaaactcctcatctatgaaaacaacaagcggccctcaggggtccctgaccgattctctggctccaagtctggcacgtcagccaccctgggcatcaccggactccagactggggacgaggccgattatttctgcggaacgtgggatggcagcctgagtgttttcggcggagggaccaagctgaccgtccta

SEQ ID NO: 822 - protein, 109 aa, Artificial Sequence
  YU534-C02 VL PRT
QSVLTQPPSVSGAPGQRVTISCTGSSSNIGAAYDVHWYQQLPGTAPKLLIYENNKRPSGVPDRFSGSKSGTSATLGITGLQTGDEADYFCGTWDGSLSVFGGGTKLTVL

SEQ ID NO: 823 - DNA, 384 bp, Artificial Sequence
  YU534-C02 VH DNA
gaggtgcagctgttggagtctgggggaggcttggtacagcctggggggtccctgagactctcctgtgcagcctctggattcacctttagcacctatgccatgagctgggtccgccaggctccagggaaggggctggagtgggtctcaactattagtggtactggtggtatcacatactacgcagactccgtgaagggccggttcaccatctccagagacaattccaagaacacgctgtatctgcaaatgaacagcctgagagccgaggacacggccgtatattactgtgcgaaagtcggagataattactatgataggagtggtaattatcacatggactactttgactactggggccagggaaccctggtcaccgtgtcctca

SEQ ID NO: 824 - protein, 128 aa, Artificial Sequence
  YU534-C02 VH PRT
EVQLLESGGGLVQPGGSLRLSCAASGFTFSTYAMSWVRQAPGKGLEWVSTISGTGGITYYADSVKGRFTISRDNSKNTLYLQMNSLRAEDTAVYYCAKVGDNYYDRSGNYHMDYFDYWGQGTLVTVSS

SEQ ID NO: 825 - DNA, 1368 bp, Artificial Sequence
  YU534-C02 VH complete DNA
gaggtgcagctgttggagtctgggggaggcttggtacagcctggggggtccctgagactctcctgtgcagcctctggattcacctttagcacctatgccatgagctgggtccgccaggctccagggaaggggctggagtgggtctcaactattagtggtactggtggtatcacatactacgcagactccgtgaagggccggttcaccatctccagagacaattccaagaacacgctgtatctgcaaatgaacagcctgagagccgaggacacggccgtatattactgtgcgaaagtcggagataattactatgataggagtggtaattatcacatggactactttgactactggggccagggaaccctggtcaccgtgtcctcagctagcaccaagggcccatcggtcttccccctggcaccctcctccaagagcacctctgggggcacagcggccctgggctgcctggtcaaggactacttccccgaaccggtgacggtgtcgtggaactcaggcgccctgaccagcggcgtgcacaccttcccggctgtcctacagtcctcaggactctactccctcagcagcgtggtgaccgtgccctccagcagcttgggcacccagacctacatctgcaacgtgaatcacaagcccagcaacaccaaggtggacaagaaagttgagcccaaatcttgtgacaaaactcacacatgcccaccgtgcccagcacctccagtggccggaccgtcagtcttcctcttccccccaaaacccaaggacaccctcatgatctcccggacccctgaggtcacatgcgtggtggtgggcgtgagccacgaagaccctgaggtcaagttcaactggtacgtggacggcgtggaggtgcataatgccaagacaaagccgcgggaggagcagtacaacagcacgtaccgggtggtcagcgtcctcaccgtcctgcaccaggactggctgaatggcaaggagtacaagtgcaaggtctccaacaaacagctcccatcccccatcgagaaaaccatctccaaagccaaagggcagccccgagaaccacaggtgtacaccctgcccccatcccgggatgagctgaccaagaaccaggtcagcctgacctgcctggtcaaaggcttctatcccagcgacatcgccgtggagtgggagagcaatgggcagccggagaacaactacaagaccacgcctcccgtgctggactccgacggctccttcttcctctacagcaagctcaccgtggacaagagcaggtggcagcaggggaacgtcttctcatgctccgtgatgcatgaggctctgcacaaccactacacgcagaaaagcctctccctgtccccgggt

SEQ ID NO: 826 - protein, 456 aa, Artificial Sequence
  YU534-C02 VH complete PRT
EVQLLESGGGLVQPGGSLRLSCAASGFTFSTYAMSWVRQAPGKGLEWVSTISGTGGITYYADSVKGRFTISRDNSKNTLYLQMNSLRAEDTAVYYCAKVGDNYYDRSGNYHMDYFDYWGQGTLVTVSSASTKGPSVFPLAPSSKSTSGGTAALGCLVKDYFPEPVTVSWNSGALTSGVHTFPAVLQSSGLYSLSSVVTVPSSSLGTQTYICNVNHKPSNTKVDKKVEPKSCDKTHTCPPCPAPPVAGPSVFLFPPKPKDTLMISRTPEVTCVVVGVSHEDPEVKFNWYVDGVEVHNAKTKPREEQYNSTYRVVSVLTVLHQDWLNGKEYKCKVSNKQLPSPIEKTISKAKGQPREPQVYTLPPSRDELTKNQVSLTCLVKGFYPSDIAVEWESNGQPENNYKTTPPVLDSDGSFFLYSKLTVDKSRWQQGNVFSCSVMHEALHNHYTQKSLSLSPG

SEQ ID NO: 827 - DNA, 645 bp, Artificial Sequence
  YU534-C02 VL complete DNA
cagtctgtgttgacgcagccgccctcagtgtctggggccccagggcagagggtcaccatctcctgcactgggagcagctccaacatcggggcagcttatgatgtacactggtaccagcagcttccaggaacggcccccaaactcctcatctatgaaaacaacaagcggccctcaggggtccctgaccgattctctggctccaagtctggcacgtcagccaccctgggcatcaccggactccagactggggacgaggccgattatttctgcggaacgtgggatggcagcctgagtgttttcggcggagggaccaagctgaccgtcctaggtcagcccaaggctgcaccaagtgtcactctgttcccgccctcctctgaggagcttcaagccaacaaggccacactggtgtgtctcataagtgacttctacccgggagccgtgacagtggcctggaaggcagatagcagccccgtcaaggcgggagtggagaccaccacaccctccaaacaaagcaacaacaagtacgcggccagcagctatctgagcctgacgcctgagcagtggaagtcccacagaagctacagctgccaggtcacgcatgaagggagcaccgtggagaagacagtggcccctacagaatgttca

SEQ ID NO: 828 - protein, 215 aa, Artificial Sequence
  YU534-C02 VL complete PRT
QSVLTQPPSVSGAPGQRVTISCTGSSSNIGAAYDVHWYQQLPGTAPKLLIYENNKRPSGVPDRFSGSKSGTSATLGITGLQTGDEADYFCGTWDGSLSVFGGGTKLTVLGQPKAAPSVTLFPPSSEELQANKATLVCLISDFYPGAVTVAWKADSSPVKAGVETTTPSKQSNNKYAASSYLSLTPEQWKSHRSYSCQVTHEGSTVEKTVAPTECS

SEQ ID NO: 829 - DNA, 15 bp, Artificial Sequence
  YU534-C06 HCDR1 DNA
acctatgccatgagc

SEQ ID NO: 830 - protein, 5 aa, Artificial Sequence
  YU534-C06 HCDR1 PRT
TYAMS

SEQ ID NO: 831 - DNA, 51 bp, Artificial Sequence; identical to SEQ ID NO: 791
  YU534-C06 HCDR2 DNA

SEQ ID NO: 832 - protein, 16 aa, Artificial Sequence
  YU534-C06 HCDR2 PRT
TISGTGGITYYADSVK

SEQ ID NO: 833 - DNA, 57 bp, Artificial Sequence; identical to SEQ ID NO: 793
  YU534-C06 HCDR3 DNA

SEQ ID NO: 834 - protein, 19 aa, Artificial Sequence
  YU534-C06 HCDR3 PRT
VGDNYYDRSGNYHMDYFDY

SEQ ID NO: 835 - DNA, 42 bp, Artificial Sequence
  YU534-C06 LCDR1 DNA
actgggagcacctccaacatcggggcaggttatgatgttcag

SEQ ID NO: 836 - protein, 14 aa, Artificial Sequence
  YU534-C06 LCDR1 PRT
TGSTSNIGAGYDVQ

SEQ ID NO: 837 - DNA, 21 bp, Artificial Sequence
  YU534-C06 LCDR2 DNA
gaggacaacaatcggccctca

SEQ ID NO: 838 - protein, 7 aa, Artificial Sequence
  YU534-C06 LCDR2 PRT
EDNNRPS

SEQ ID NO: 839 - DNA, 33 bp, Artificial Sequence
  YU534-C06 LCDR3 DNA
cagtcctctgtcagcagcctgagtgctgtggta

SEQ ID NO: 840 - protein, 11 aa, Artificial Sequence
  YU534-C06 LCDR3 PRT
QSSVSSLSAVV

SEQ ID NO: 841 - DNA, 333 bp, Artificial Sequence
  YU534-C06 VL DNA
cagtctgtgttgacgcagccgccctcagtgtctggggccccagggcagagggtcaccatctcctgcactgggagcacctccaacatcggggcaggttatgatgttcagtggtaccagcagcttccaggaaaagcccccaaactcctcgtctatgaggacaacaatcggccctcaggggtccctgaccgattctctggctccaagtctggcacctcagcctccctggccatcactgggctccaggccgaggatgaggctgattattactgccagtcctctgtcagcagcctgagtgctgtggtattcggcggagggaccaagctgaccgtccta

SEQ ID NO: 842 - protein, 111 aa, Artificial Sequence
  YU534-C06 VL PRT
QSVLTQPPSVSGAPGQRVTISCTGSTSNIGAGYDVQWYQQLPGKAPKLLVYEDNNRPSGVPDRFSGSKSGTSASLAITGLQAEDEADYYCQSSVSSLSAVVFGGGTKLTVL

SEQ ID NO: 843 - DNA, 384 bp, Artificial Sequence; identical to SEQ ID NO: 823
  YU534-C06 VH DNA

SEQ ID NO: 844 - protein, 128 aa, Artificial Sequence; identical to SEQ ID NO: 824
  YU534-C06 VH PRT

SEQ ID NO: 845 - DNA, 1368 bp, Artificial Sequence; identical to SEQ ID NO: 825
  YU534-C06 VH complete DNA

SEQ ID NO: 846 - protein, 456 aa, Artificial Sequence; identical to SEQ ID NO: 826
  YU534-C06 VH complete PRT

SEQ ID NO: 847 - DNA, 651 bp, Artificial Sequence
  YU534-C06 VL complete DNA
cagtctgtgttgacgcagccgccctcagtgtctggggccccagggcagagggtcaccatctcctgcactgggagcacctccaacatcggggcaggttatgatgttcagtggtaccagcagcttccaggaaaagcccccaaactcctcgtctatgaggacaacaatcggccctcaggggtccctgaccgattctctggctccaagtctggcacctcagcctccctggccatcactgggctccaggccgaggatgaggctgattattactgccagtcctctgtcagcagcctgagtgctgtggtattcggcggagggaccaagctgaccgtcctaggtcagcccaaggctgcaccaagtgtcactctgttcccgccctcctctgaggagcttcaagccaacaaggccacactggtgtgtctcataagtgacttctacccgggagccgtgacagtggcctggaaggcagatagcagccccgtcaaggcgggagtggagaccaccacaccctccaaacaaagcaacaacaagtacgcggccagcagctatctgagcctgacgcctgagcagtggaagtcccacagaagctacagctgccaggtcacgcatgaagggagcaccgtggagaagacagtggcccctacagaatgttca

SEQ ID NO: 848 - protein, 217 aa, Artificial Sequence
  YU534-C06 VL complete PRT
QSVLTQPPSVSGAPGQRVTISCTGSTSNIGAGYDVQWYQQLPGKAPKLLVYEDNNRPSGVPDRFSGSKSGTSASLAITGLQAEDEADYYCQSSVSSLSAVVFGGGTKLTVLGQPKAAPSVTLFPPSSEELQANKATLVCLISDFYPGAVTVAWKADSSPVKAGVETTTPSKQSNNKYAASSYLSLTPEQWKSHRSYSCQVTHEGSTVEKTVAPTECS

SEQ ID NO: 849 - DNA, 15 bp, Artificial Sequence
  YU536-C12 HCDR1 DNA
acctatgccatgagc

SEQ ID NO: 850 - protein, 5 aa, Artificial Sequence
  YU536-C12 HCDR1 PRT
TYAMS

SEQ ID NO: 851 - DNA, 51 bp, Artificial Sequence; identical to SEQ ID NO: 791
  YU536-C12 HCDR2 DNA

SEQ ID NO: 852 - protein, 16 aa, Artificial Sequence
  YU536-C12 HCDR2 PRT
TISGTGGITYYADSVK

SEQ ID NO: 853 - DNA, 57 bp, Artificial Sequence; identical to SEQ ID NO: 793
  YU536-C12 HCDR3 DNA

SEQ ID NO: 854 - protein, 19 aa, Artificial Sequence
  YU536-C12 HCDR3 PRT
VGDNYYDRSGNYHMDYFDY

SEQ ID NO: 855 - DNA, 42 bp, Artificial Sequence
  YU536-C12 LCDR1 DNA
actggaaccagcagtgaccttggtgcttatgactatgtctcc

SEQ ID NO: 856 - protein, 14 aa, Artificial Sequence
  YU536-C12 LCDR1 PRT
TGTSSDLGAYDYVS

SEQ ID NO: 857 - DNA, 21 bp, Artificial Sequence
  YU536-C12 LCDR2 DNA
gatgtcaataatcggccctca

SEQ ID NO: 858 - protein, 7 aa, Artificial Sequence
  YU536-C12 LCDR2 PRT
DVNNRPS

SEQ ID NO: 859 - DNA, 30 bp, Artificial Sequence
  YU536-C12 LCDR3 DNA
aactcatatacaagcagcagcacttgggtg

SEQ ID NO: 860 - protein, 10 aa, Artificial Sequence
  YU536-C12 LCDR3 PRT
NSYTSSSTWV

SEQ ID NO: 861 - DNA, 330 bp, Artificial Sequence
  YU536-C12 VL DNA
cagtctgccctgactcagcctgcctccgtgtctgggtctcctggacagtcggtcaccatctcctgcactggaaccagcagtgaccttggtgcttatgactatgtctcctggtaccaacaacacccaggcaaagcccccaaactcatgatttatgatgtcaataatcggccctcaggggtttctaatcgcttctctggctccaagtctggcaacacggcctccctgaccatctctgggctccaggctgaggacgaggctgattattactgcaactcatatacaagcagcagcacttgggtgttcggcggagggaccaagctgaccgtccta

SEQ ID NO: 862 - protein, 110 aa, Artificial Sequence
  YU536-C12 VL PRT
QSALTQPASVSGSPGQSVTISCTGTSSDLGAYDYVSWYQQHPGKAPKLMIYDVNNRPSGVSNRFSGSKSGNTASLTISGLQAEDEADYYCNSYTSSSTWVFGGGTKLTVL

SEQ ID NO: 863 - DNA, 384 bp, Artificial Sequence; identical to SEQ ID NO: 823
  YU536-C12 VH DNA

SEQ ID NO: 864 - protein, 128 aa, Artificial Sequence; identical to SEQ ID NO: 824
  YU536-C12 VH PRT

SEQ ID NO: 865 - DNA, 1368 bp, Artificial Sequence; identical to SEQ ID NO: 825
  YU536-C12 VH complete DNA

SEQ ID NO: 866 - protein, 456 aa, Artificial Sequence; identical to SEQ ID NO: 826
  YU536-C12 VH complete PRT

SEQ ID NO: 867 - DNA, 648 bp, Artificial Sequence
  YU536-C12 VL complete DNA
cagtctgccctgactcagcctgcctccgtgtctgggtctcctggacagtcggtcaccatctcctgcactggaaccagcagtgaccttggtgcttatgactatgtctcctggtaccaacaacacccaggcaaagcccccaaactcatgatttatgatgtcaataatcggccctcaggggtttctaatcgcttctctggctccaagtctggcaacacggcctccctgaccatctctgggctccaggctgaggacgaggctgattattactgcaactcatatacaagcagcagcacttgggtgttcggcggagggaccaagctgaccgtcctaggtcagcccaaggctgcaccaagtgtcactctgttcccgccctcctctgaggagcttcaagccaacaaggccacactggtgtgtctcataagtgacttctacccgggagccgtgacagtggcctggaaggcagatagcagccccgtcaaggcgggagtggagaccaccacaccctccaaacaaagcaacaacaagtacgcggccagcagctatctgagcctgacgcctgagcagtggaagtcccacagaagctacagctgccaggtcacgcatgaagggagcaccgtggagaagacagtggcccctacagaatgttca

SEQ ID NO: 868 - protein, 216 aa, Artificial Sequence
  YU536-C12 VL complete PRT
QSALTQPASVSGSPGQSVTISCTGTSSDLGAYDYVSWYQQHPGKAPKLMIYDVNNRPSGVSNRFSGSKSGNTASLTISGLQAEDEADYYCNSYTSSSTWVFGGGTKLTVLGQPKAAPSVTLFPPSSEELQANKATLVCLISDFYPGAVTVAWKADSSPVKAGVETTTPSKQSNNKYAASSYLSLTPEQWKSHRSYSCQVTHEGSTVEKTVAPTECS

SEQ ID NO: 869 - DNA, 15 bp, Artificial Sequence
  YU534-G10 HCDR1 DNA
acctatgccatgagc

SEQ ID NO: 870 - protein, 5 aa, Artificial Sequence
  YU534-G10 HCDR1 PRT
TYAMS

SEQ ID NO: 871 - DNA, 51 bp, Artificial Sequence; identical to SEQ ID NO: 791
  YU534-G10 HCDR2 DNA

SEQ ID NO: 872 - protein, 16 aa, Artificial Sequence
  YU534-G10 HCDR2 PRT
TISGTGGITYYADSVK

SEQ ID NO: 873 - DNA, 57 bp, Artificial Sequence; identical to SEQ ID NO: 793
  YU534-G10 HCDR3 DNA

SEQ ID NO: 874 - protein, 19 aa, Artificial Sequence
  YU534-G10 HCDR3 PRT
VGDNYYDRSGNYHMDYFDY

SEQ ID NO: 875 - DNA, 42 bp, Artificial Sequence; identical to SEQ ID NO: 475
  YU534-G10 LCDR1 DNA

SEQ ID NO: 876 - protein, 14 aa, Artificial Sequence
  YU534-G10 LCDR1 PRT
TGTSSDVGSYNLVS

SEQ ID NO: 877 - DNA, 21 bp, Artificial Sequence
  YU534-G10 LCDR2 DNA
gagggcagtcagcggccctca

SEQ ID NO: 878 - protein, 7 aa, Artificial Sequence
  YU534-G10 LCDR2 PRT
EGSQRPS

SEQ ID NO: 879 - DNA, 30 bp, Artificial Sequence
  YU534-G10 LCDR3 DNA
agctcatatacaagcagcagcaccgtggta

SEQ ID NO: 880 - protein, 10 aa, Artificial Sequence
  YU534-G10 LCDR3 PRT
SSYTSSSTVV

SEQ ID NO: 881 - DNA, 330 bp, Artificial Sequence
  YU534-G10 VL DNA
cagtctgccctgactcagcctgcctccgtgtctgggtctcctggacaggcgatcaccatctcctgcactggaaccagcagtgatgttgggagttataaccttgtctcctggtaccaacagcacccaggcaaagcccccaaactgatgatttatgagggcagtcagcggccctcaggggtttctaatcgcttctctggctccaagtctggcaacacggcctccctgacaatctctgggctccaggctgaggacgaggctgattattactgcagctcatatacaagcagcagcaccgtggtattcggcggagggaccaagctgaccgtccta

SEQ ID NO: 882 - protein, 110 aa, Artificial Sequence
  YU534-G10 VL PRT
QSALTQPASVSGSPGQAITISCTGTSSDVGSYNLVSWYQQHPGKAPKLMIYEGSQRPSGVSNRFSGSKSGNTASLTISGLQAEDEADYYCSSYTSSSTVVFGGGTKLTVL

SEQ ID NO: 883 - DNA, 384 bp, Artificial Sequence
  YU534-G10 VH DNA
caggtgcagctggtggagtctgggggaggcttggtacagcctggggggtccctgagactctcctgtgcagcctctggattcacctttagcacctatgccatgagctgggtccgccaggctccagggaaggggctggagtgggtctcaactattagtggtactggtggtatcacatactacgcagactccgtgaagggccggttcaccatctccagagacaattccaagaacacgctgtatctgcaaatgaacagcctgagagccgaggacacggccgtatattactgtgcgaaagtcggagataattactatgataggagtggtaattatcacatggactactttgactactggggccagggaaccctggtcaccgtgtcctca

SEQ ID NO: 884 - protein, 128 aa, Artificial Sequence
  YU534-G10 VH PRT
QVQLVESGGGLVQPGGSLRLSCAASGFTFSTYAMSWVRQAPGKGLEWVSTISGTGGITYYADSVKGRFTISRDNSKNTLYLQMNSLRAEDTAVYYCAKVGDNYYDRSGNYHMDYFDYWGQGTLVTVSS

SEQ ID NO: 885 - DNA, 1368 bp, Artificial Sequence
  YU534-G10 VH complete DNA
caggtgcagctggtggagtctgggggaggcttggtacagcctggggggtccctgagactctcctgtgcagcctctggattcacctttagcacctatgccatgagctgggtccgccaggctccagggaaggggctggagtgggtctcaactattagtggtactggtggtatcacatactacgcagactccgtgaagggccggttcaccatctccagagacaattccaagaacacgctgtatctgcaaatgaacagcctgagagccgaggacacggccgtatattactgtgcgaaagtcggagataattactatgataggagtggtaattatcacatggactactttgactactggggccagggaaccctggtcaccgtgtcctcagctagcaccaagggcccatcggtcttccccctggcaccctcctccaagagcacctctgggggcacagcggccctgggctgcctggtcaaggactacttccccgaaccggtgacggtgtcgtggaactcaggcgccctgaccagcggcgtgcacaccttcccggctgtcctacagtcctcaggactctactccctcagcagcgtggtgaccgtgccctccagcagcttgggcacccagacctacatctgcaacgtgaatcacaagcccagcaacaccaaggtggacaagaaagttgagcccaaatcttgtgacaaaactcacacatgcccaccgtgcccagcacctccagtggccggaccgtcagtcttcctcttccccccaaaacccaaggacaccctcatgatctcccggacccctgaggtcacatgcgtggtggtgggcgtgagccacgaagaccctgaggtcaagttcaactggtacgtggacggcgtggaggtgcataatgccaagacaaagccgcgggaggagcagtacaacagcacgtaccgggtggtcagcgtcctcaccgtcctgcaccaggactggctgaatggcaaggagtacaagtgcaaggtctccaacaaacagctcccatcccccatcgagaaaaccatctccaaagccaaagggcagccccgagaaccacaggtgtacaccctgcccccatcccgggatgagctgaccaagaaccaggtcagcctgacctgcctggtcaaaggcttctatcccagcgacatcgccgtggagtgggagagcaatgggcagccggagaacaactacaagaccacgcctcccgtgctggactccgacggctccttcttcctctacagcaagctcaccgtggacaagagcaggtggcagcaggggaacgtcttctcatgctccgtgatgcatgaggctctgcacaaccactacacgcagaaaagcctctccctgtccccgggt

SEQ ID NO: 886 - protein, 456 aa, Artificial Sequence
  YU534-G10 VH complete PRT
QVQLVESGGGLVQPGGSLRLSCAASGFTFSTYAMSWVRQAPGKGLEWVSTISGTGGITYYADSVKGRFTISRDNSKNTLYLQMNSLRAEDTAVYYCAKVGDNYYDRSGNYHMDYFDYWGQGTLVTVSSASTKGPSVFPLAPSSKSTSGGTAALGCLVKDYFPEPVTVSWNSGALTSGVHTFPAVLQSSGLYSLSSVVTVPSSSLGTQTYICNVNHKPSNTKVDKKVEPKSCDKTHTCPPCPAPPVAGPSVFLFPPKPKDTLMISRTPEVTCVVVGVSHEDPEVKFNWYVDGVEVHNAKTKPREEQYNSTYRVVSVLTVLHQDWLNGKEYKCKVSNKQLPSPIEKTISKAKGQPREPQVYTLPPSRDELTKNQVSLTCLVKGFYPSDIAVEWESNGQPENNYKTTPPVLDSDGSFFLYSKLTVDKSRWQQGNVFSCSVMHEALHNHYTQKSLSLSPG

SEQ ID NO: 887 - DNA, 648 bp, Artificial Sequence
  YU534-G10 VL complete DNA
cagtctgccctgactcagcctgcctccgtgtctgggtctcctggacaggcgatcaccatctcctgcactggaaccagcagtgatgttgggagttataaccttgtctcctggtaccaacagcacccaggcaaagcccccaaactgatgatttatgagggcagtcagcggccctcaggggtttctaatcgcttctctggctccaagtctggcaacacggcctccctgacaatctctgggctccaggctgaggacgaggctgattattactgcagctcatatacaagcagcagcaccgtggtattcggcggagggaccaagctgaccgtcctaggtcagcccaaggctgcaccaagtgtcactctgttcccgccctcctctgaggagcttcaagccaacaaggccacactggtgtgtctcataagtgacttctacccgggagccgtgacagtggcctggaaggcagatagcagccccgtcaaggcgggagtggagaccaccacaccctccaaacaaagcaacaacaagtacgcggccagcagctatctgagcctgacgcctgagcagtggaagtcccacagaagctacagctgccaggtcacgcatgaagggagcaccgtggagaagacagtggcccctacagaatgttca

SEQ ID NO: 888 - protein, 216 aa, Artificial Sequence
  YU534-G10 VL complete PRT
QSALTQPASVSGSPGQAITISCTGTSSDVGSYNLVSWYQQHPGKAPKLMIYEGSQRPSGVSNRFSGSKSGNTASLTISGLQAEDEADYYCSSYTSSSTVVFGGGTKLTVLGQPKAAPSVTLFPPSSEELQANKATLVCLISDFYPGAVTVAWKADSSPVKAGVETTTPSKQSNNKYAASSYLSLTPEQWKSHRSYSCQVTHEGSTVEKTVAPTECS

SEQ ID NO: 889 - DNA, 15 bp, Artificial Sequence
  YU505-A01 HCDR1 DNA
agctactatatgcac

SEQ ID NO: 890 - protein, 5 aa, Artificial Sequence
  YU505-A01 HCDR1 PRT
SYYMH

SEQ ID NO: 891 - DNA, 51 bp, Artificial Sequence; identical to SEQ ID NO: 171
  YU505-A01 HCDR2 DNA

SEQ ID NO: 892 - protein, 16 aa, Artificial Sequence
  YU505-A01 HCDR2 PRT
IINPSGGSTSYAQKFQ

SEQ ID NO: 893 - DNA, 57 bp, Artificial Sequence
  YU505-A01 HCDR3 DNA
gaccgccattactatgatagtagtggttcttcccaggccacctttctctttgactac

SEQ ID NO: 894 - protein, 19 aa, Artificial Sequence
  YU505-A01 HCDR3 PRT
DRHYYDSSGSSQATFLFDY

SEQ ID NO: 895 - DNA, 42 bp, Artificial Sequence; identical to SEQ ID NO: 235
  YU505-A01 LCDR1 DNA

SEQ ID NO: 896 - protein, 14 aa, Artificial Sequence
  YU505-A01 LCDR1 PRT
TGSSSNIGAGYDVH

SEQ ID NO: 897 - DNA, 21 bp, Artificial Sequence
  YU505-A01 LCDR2 DNA
ggtaacagcaatcggccctca

SEQ ID NO: 898 - protein, 7 aa, Artificial Sequence
  YU505-A01 LCDR2 PRT
GNSNRPS

SEQ ID NO: 899 - DNA, 27 bp, Artificial Sequence
  YU505-A01 LCDR3 DNA
cagtcctatgacagcagcctgaatgtc

SEQ ID NO: 900 - protein, 9 aa, Artificial Sequence
  YU505-A01 LCDR3 PRT
QSYDSSLNV

SEQ ID NO: 901 - DNA, 327 bp, Artificial Sequence
  YU505-A01 VL DNA
cagtctgtgttgacgcagccgccctcagtgtctggggccccagggcagagggtcaccatctcctgcactgggagcagctccaacatcggggcaggttatgatgtacactggtaccagcagcttccaggaacagcccccaaactcctcatctatggtaacagcaatcggccctcaggggtccctgaccgattctctggctccaagtctggcacctcagcctccctggccatcactgggctccaggctgaggatgaggctgattattactgccagtcctatgacagcagcctgaatgtcttcggaactgggaccaagctgaccgtccta

SEQ ID NO: 902 - protein, 109 aa, Artificial Sequence
  YU505-A01 VL PRT
QSVLTQPPSVSGAPGQRVTISCTGSSSNIGAGYDVHWYQQLPGTAPKLLIYGNSNRPSGVPDRFSGSKSGTSASLAITGLQAEDEADYYCQSYDSSLNVFGTGTKLTVL

SEQ ID NO: 903 - DNA, 384 bp, Artificial Sequence
  YU505-A01 VH DNA
caggtgcagctggtgcagtctggggctgaggtgaagaagcctggggcctcagtgaaggtttcctgcaaggcatctggatacaccttcaccagctactatatgcactgggtgcgacaggcccctggacaagggcttgagtggatgggaataatcaaccctagtggtggtagcacaagctacgcacagaagttccagggcagagtcaccatgaccagggacacgtccacgagcacagtctacatggagctgagcagcctgagatctgaggacacggccgtgtattactgtgctagagaccgccattactatgatagtagtggttcttcccaggccacctttctctttgactactggggccagggaaccctggtcaccgtgtcctca

SEQ ID NO: 904 - protein, 128 aa, Artificial Sequence
  YU505-A01 VH PRT
QVQLVQSGAEVKKPGASVKVSCKASGYTFTSYYMHWVRQAPGQGLEWMGIINPSGGSTSYAQKFQGRVTMTRDTSTSTVYMELSSLRSEDTAVYYCARDRHYYDSSGSSQATFLFDYWGQGTLVTVSS

SEQ ID NO: 905 - DNA, 1368 bp, Artificial Sequence
  YU505-A01 VH complete DNA
caggtgcagctggtgcagtctggggctgaggtgaagaagcctggggcctcagtgaaggtttcctgcaaggcatctggatacaccttcaccagctactatatgcactgggtgcgacaggcccctggacaagggcttgagtggatgggaataatcaaccctagtggtggtagcacaagctacgcacagaagttccagggcagagtcaccatgaccagggacacgtccacgagcacagtctacatggagctgagcagcctgagatctgaggacacggccgtgtattactgtgctagagaccgccattactatgatagtagtggttcttcccaggccacctttctctttgactactggggccagggaaccctggtcaccgtgtcctcagctagcaccaagggcccatcggtcttccccctggcaccctcctccaagagcacctctgggggcacagcggccctgggctgcctggtcaaggactacttccccgaaccggtgacggtgtcgtggaactcaggcgccctgaccagcggcgtgcacaccttcccggctgtcctacagtcctcaggactctactccctcagcagcgtggtgaccgtgccctccagcagcttgggcacccagacctacatctgcaacgtgaatcacaagcccagcaacaccaaggtggacaagaaagttgagcccaaatcttgtgacaaaactcacacatgcccaccgtgcccagcacctccagtggccggaccgtcagtcttcctcttccccccaaaacccaaggacaccctcatgatctcccggacccctgaggtcacatgcgtggtggtgggcgtgagccacgaagaccctgaggtcaagttcaactggtacgtggacggcgtggaggtgcataatgccaagacaaagccgcgggaggagcagtacaacagcacgtaccgggtggtcagcgtcctcaccgtcctgcaccaggactggctgaatggcaaggagtacaagtgcaaggtctccaacaaacagctcccatcccccatcgagaaaaccatctccaaagccaaagggcagccccgagaaccacaggtgtacaccctgcccccatcccgggatgagctgaccaagaaccaggtcagcctgacctgcctggtcaaaggcttctatcccagcgacatcgccgtggagtgggagagcaatgggcagccggagaacaactacaagaccacgcctcccgtgctggactccgacggctccttcttcctctacagcaagctcaccgtggacaagagcaggtggcagcaggggaacgtcttctcatgctccgtgatgcatgaggctctgcacaaccactacacgcagaaaagcctctccctgtccccgggt

SEQ ID NO: 906 - protein, 456 aa, Artificial Sequence
  YU505-A01 VH complete PRT
QVQLVQSGAEVKKPGASVKVSCKASGYTFTSYYMHWVRQAPGQGLEWMGIINPSGGSTSYAQKFQGRVTMTRDTSTSTVYMELSSLRSEDTAVYYCARDRHYYDSSGSSQATFLFDYWGQGTLVTVSSASTKGPSVFPLAPSSKSTSGGTAALGCLVKDYFPEPVTVSWNSGALTSGVHTFPAVLQSSGLYSLSSVVTVPSSSLGTQTYICNVNHKPSNTKVDKKVEPKSCDKTHTCPPCPAPPVAGPSVFLFPPKPKDTLMISRTPEVTCVVVGVSHEDPEVKFNWYVDGVEVHNAKTKPREEQYNSTYRVVSVLTVLHQDWLNGKEYKCKVSNKQLPSPIEKTISKAKGQPREPQVYTLPPSRDELTKNQVSLTCLVKGFYPSDIAVEWESNGQPENNYKTTPPVLDSDGSFFLYSKLTVDKSRWQQGNVFSCSVMHEALHNHYTQKSLSLSPG

SEQ ID NO: 907 - DNA, 645 bp, Artificial Sequence
  YU505-A01 VL complete DNA
cagtctgtgttgacgcagccgccctcagtgtctggggccccagggcagagggtcaccatctcctgcactgggagcagctccaacatcggggcaggttatgatgtacactggtaccagcagcttccaggaacagcccccaaactcctcatctatggtaacagcaatcggccctcaggggtccctgaccgattctctggctccaagtctggcacctcagcctccctggccatcactgggctccaggctgaggatgaggctgattattactgccagtcctatgacagcagcctgaatgtcttcggaactgggaccaagctgaccgtcctaggtcagcccaaggctgcaccaagtgtcactctgttcccgccctcctctgaggagcttcaagccaacaaggccacactggtgtgtctcataagtgacttctacccgggagccgtgacagtggcctggaaggcagatagcagccccgtcaaggcgggagtggagaccaccacaccctccaaacaaagcaacaacaagtacgcggccagcagctatctgagcctgacgcctgagcagtggaagtcccacagaagctacagctgccaggtcacgcatgaagggagcaccgtggagaagacagtggcccctacagaatgttca

SEQ ID NO: 908 - protein, 215 aa, Artificial Sequence
  YU505-A01 VL complete PRT
QSVLTQPPSVSGAPGQRVTISCTGSSSNIGAGYDVHWYQQLPGTAPKLLIYGNSNRPSGVPDRFSGSKSGTSASLAITGLQAEDEADYYCQSYDSSLNVFGTGTKLTVLGQPKAAPSVTLFPPSSEELQANKATLVCLISDFYPGAVTVAWKADSSPVKAGVETTTPSKQSNNKYAASSYLSLTPEQWKSHRSYSCQVTHEGSTVEKTVAPTECS

SEQ ID NO: 909 - DNA, 15 bp, Artificial Sequence
  YU505-A02 HCDR1 DNA
agctatgctatcagc

SEQ ID NO: 910 - protein, 5 aa, Artificial Sequence
  YU505-A02 HCDR1 PRT
SYAIS

SEQ ID NO: 911 - DNA, 51 bp, Artificial Sequence
  YU505-A02 HCDR2 DNA
gggatcatccctatctttggtacagcaaactacgcacagaagttccagggc

SEQ ID NO: 912 - protein, 16 aa, Artificial Sequence
  YU505-A02 HCDR2 PRT
GIIPIFGTANYAQKFQ

SEQ ID NO: 913 - DNA, 57 bp, Artificial Sequence
  YU505-A02 HCDR3 DNA
caaatctgggcttatgatagtagtggttaccccgtcccggccgaatacttccagcac

SEQ ID NO: 914 - protein, 19 aa, Artificial Sequence
  YU505-A02 HCDR3 PRT
QIWAYDSSGYPVPAEYFQH

SEQ ID NO: 915 - DNA, 42 bp, Artificial Sequence; identical to SEQ ID NO: 235
  YU505-A02 LCDR1 DNA

SEQ ID NO: 916 - protein, 14 aa, Artificial Sequence
  YU505-A02 LCDR1 PRT
TGSSSNIGAGYDVH

SEQ ID NO: 917 - DNA, 21 bp, Artificial Sequence
  YU505-A02 LCDR2 DNA
ggtaacagcaatcggccctca

SEQ ID NO: 918 - protein, 7 aa, Artificial Sequence
  YU505-A02 LCDR2 PRT
GNSNRPS

SEQ ID NO: 919 - DNA, 33 bp, Artificial Sequence
  YU505-A02 LCDR3 DNA
cagtcctatgacagcagcctgagtggtgtggta

SEQ ID NO: 920 - protein, 11 aa, Artificial Sequence
  YU505-A02 LCDR3 PRT
QSYDSSLSGVV

SEQ ID NO: 921 - DNA, 333 bp, Artificial Sequence
  YU505-A02 VL DNA
cagtctgtgttgacgcagccgccctcggtgtctggggccccagggcagagggtcaccatctcctgcactgggagcagctccaacatcggggcaggttatgatgtacactggtaccagcagcttccaggaacagcccccaaactcctcatctatggtaacagcaatcggccctcaggggtccctgaccgattctctggctccaagtctggcacctcagcctccctggccatcactgggctccaggctgaggatgaggctgattattactgccagtcctatgacagcagcctgagtggtgtggtattcggcggagggaccaagctgaccgtccta

SEQ ID NO: 922 - protein, 111 aa, Artificial Sequence; identical to SEQ ID NO: 702
  YU505-A02 VL PRT

SEQ ID NO: 923 - DNA, 384 bp, Artificial Sequence
  YU505-A02 VH DNA
caggtgcagctggtggagtctggggctgaggtgaagaagcctgggtcctcggtgaaggtctcctgcaaggcttctggaggcaccttcagcagctatgctatcagctgggtgcgacaggcccctggacaagggcttgagtggatgggagggatcatccctatctttggtacagcaaactacgcacagaagttccagggcagagtcacgattaccgcggacgaatccacgagcacagcctacatggagctgagcagcctgagatctgaggacacggccgtgtattactgtgcacgtcaaatctgggcttatgatagtagtggttaccccgtcccggccgaatacttccagcactggggccagggcaccctggtcaccgtgtcctca

SEQ ID NO: 924 - protein, 128 aa, Artificial Sequence
  YU505-A02 VH PRT
QVQLVESGAEVKKPGSSVKVSCKASGGTFSSYAISWVRQAPGQGLEWMGGIIPIFGTANYAQKFQGRVTITADESTSTAYMELSSLRSEDTAVYYCARQIWAYDSSGYPVPAEYFQHWGQGTLVTVSS

SEQ ID NO: 925 - DNA, 1368 bp, Artificial Sequence
  YU505-A02 VH complete DNA
caggtgcagctggtggagtctggggctgaggtgaagaagcctgggtcctcggtgaaggtctcctgcaaggcttctggaggcaccttcagcagctatgctatcagctgggtgcgacaggcccctggacaagggcttgagtggatgggagggatcatccctatctttggtacagcaaactacgcacagaagttccagggcagagtcacgattaccgcggacgaatccacgagcacagcctacatggagctgagcagcctgagatctgaggacacggccgtgtattactgtgcacgtcaaatctgggcttatgatagtagtggttaccccgtcccggccgaatacttccagcactggggccagggcaccctggtcaccgtgtcctcagctagcaccaagggcccatcggtcttccccctggcaccctcctccaagagcacctctgggggcacagcggccctgggctgcctggtcaaggactacttccccgaaccggtgacggtgtcgtggaactcaggcgccctgaccagcggcgtgcacaccttcccggctgtcctacagtcctcaggactctactccctcagcagcgtggtgaccgtgccctccagcagcttgggcacccagacctacatctgcaacgtgaatcacaagcccagcaacaccaaggtggacaagaaagttgagcccaaatcttgtgacaaaactcacacatgcccaccgtgcccagcacctccagtggccggaccgtcagtcttcctcttccccccaaaacccaaggacaccctcatgatctcccggacccctgaggtcacatgcgtggtggtgggcgtgagccacgaagaccctgaggtcaagttcaactggtacgtggacggcgtggaggtgcataatgccaagacaaagccgcgggaggagcagtacaacagcacgtaccgggtggtcagcgtcctcaccgtcctgcaccaggactggctgaatggcaaggagtacaagtgcaaggtctccaacaaacagctcccatcccccatcgagaaaaccatctccaaagccaaagggcagccccgagaaccacaggtgtacaccctgcccccatcccgggatgagctgaccaagaaccaggtcagcctgacctgcctggtcaaaggcttctatcccagcgacatcgccgtggagtgggagagcaatgggcagccggagaacaactacaagaccacgcctcccgtgctggactccgacggctccttcttcctctacagcaagctcaccgtggacaagagcaggtggcagcaggggaacgtcttctcatgctccgtgatgcatgaggctctgcacaaccactacacgcagaaaagcctctccctgtccccgggt

SEQ ID NO: 926 - protein, 456 aa, Artificial Sequence
  YU505-A02 VH complete PRT
QVQLVESGAEVKKPGSSVKVSCKASGGTFSSYAISWVRQAPGQGLEWMGGIIPIFGTANYAQKFQGRVTITADESTSTAYMELSSLRSEDTAVYYCARQIWAYDSSGYPVPAEYFQHWGQGTLVTVSSASTKGPSVFPLAPSSKSTSGGTAALGCLVKDYFPEPVTVSWNSGALTSGVHTFPAVLQSSGLYSLSSVVTVPSSSLGTQTYICNVNHKPSNTKVDKKVEPKSCDKTHTCPPCPAPPVAGPSVFLFPPKPKDTLMISRTPEVTCVVVGVSHEDPEVKFNWYVDGVEVHNAKTKPREEQYNSTYRVVSVLTVLHQDWLNGKEYKCKVSNKQLPSPIEKTISKAKGQPREPQVYTLPPSRDELTKNQVSLTCLVKGFYPSDIAVEWESNGQPENNYKTTPPVLDSDGSFFLYSKLTVDKSRWQQGNVFSCSVMHEALHNHYTQKSLSLSPG

SEQ ID NO: 927 - DNA, 651 bp, Artificial Sequence
  YU505-A02 VL complete DNA
cagtctgtgttgacgcagccgccctcggtgtctggggccccagggcagagggtcaccatctcctgcactgggagcagctccaacatcggggcaggttatgatgtacactggtaccagcagcttccaggaacagcccccaaactcctcatctatggtaacagcaatcggccctcaggggtccctgaccgattctctggctccaagtctggcacctcagcctccctggccatcactgggctccaggctgaggatgaggctgattattactgccagtcctatgacagcagcctgagtggtgtggtattcggcggagggaccaagctgaccgtcctaggtcagcccaaggctgcaccaagtgtcactctgttcccgccctcctctgaggagcttcaagccaacaaggccacactggtgtgtctcataagtgacttctacccgggagccgtgacagtggcctggaaggcagatagcagccccgtcaaggcgggagtggagaccaccacaccctccaaacaaagcaacaacaagtacgcggccagcagctatctgagcctgacgcctgagcagtggaagtcccacagaagctacagctgccaggtcacgcatgaagggagcaccgtggagaagacagtggcccctacagaatgttca

SEQ ID NO: 928 - protein, 217 aa, Artificial Sequence; identical to SEQ ID NO: 708
  YU505-A02 VL complete PRT

SEQ ID NO: 929 - DNA, 15 bp, Artificial Sequence
  YU505-A05 HCDR1 DNA
agctatgctatcagc

SEQ ID NO: 930 - protein, 5 aa, Artificial Sequence
  YU505-A05 HCDR1 PRT
SYAIS

SEQ ID NO: 931 - DNA, 51 bp, Artificial Sequence; identical to SEQ ID NO: 911
  YU505-A05 HCDR2 DNA

SEQ ID NO: 932 - protein, 16 aa, Artificial Sequence
  YU505-A05 HCDR2 PRT
GIIPIFGTANYAQKFQ

SEQ ID NO: 933 - DNA, 39 bp, Artificial Sequence
  YU505-A05 HCDR3 DNA
agtgactccggatatagtggctacgggtactttgactac

SEQ ID NO: 934 - protein, 13 aa, Artificial Sequence
  YU505-A05 HCDR3 PRT
SDSGYSGYGYFDY

SEQ ID NO: 935 - DNA, 42 bp, Artificial Sequence
  YU505-A05 LCDR1 DNA
actggaaccagcagcgacgttggtcgttataactatgtctcc

SEQ ID NO: 936 - protein, 14 aa, Artificial Sequence
  YU505-A05 LCDR1 PRT
TGTSSDVGRYNYVS

SEQ ID NO: 937 - DNA, 21 bp, Artificial Sequence
  YU505-A05 LCDR2 DNA
gatgtcactaatcggccctca

SEQ ID NO: 938 - protein, 7 aa, Artificial Sequence
  YU505-A05 LCDR2 PRT
DVTNRPS

SEQ ID NO: 939 - DNA, 33 bp, Artificial Sequence
  YU505-A05 LCDR3 DNA
acctcatatacaagcagtaacactcttgtgata

SEQ ID NO: 940 - protein, 11 aa, Artificial Sequence
  YU505-A05 LCDR3 PRT
TSYTSSNTLVI

SEQ ID NO: 941 - DNA, 333 bp, Artificial Sequence
  YU505-A05 VL DNA
cagtctgccctgactcagcctgcctccgtgtctgggtctcccggacagtcgatctccatctcctgcactggaaccagcagcgacgttggtcgttataactatgtctcctggtaccaacagcacccaggcaaagcccccaaactcatgatttatgatgtcactaatcggccctcaggggtttctagtcgcttctctggctccaagtctggcaacgcggcctccctgaccatctctgggctccaggctgaggacgaggctgagtattattgcacctcatatacaagcagtaacactcttgtgatattcggcggagggaccaaggtcaccgtccta

SEQ ID NO: 942 - protein, 111 aa, Artificial Sequence
  YU505-A05 VL PRT
QSALTQPASVSGSPGQSISISCTGTSSDVGRYNYVSWYQQHPGKAPKLMIYDVTNRPSGVSSRFSGSKSGNAASLTISGLQAEDEAEYYCTSYTSSNTLVIFGGGTKVTVL

SEQ ID NO: 943 - DNA, 366 bp, Artificial Sequence
  YU505-A05 VH DNA
caggtgcagctggtgcagtctggggctgaggtgaagaagcctgggtcctcggtgaaggtctcctgcaaggcttctggaggcaccttcagcagctatgctatcagctgggtgcgacaggcccctggacaagggcttgagtggatgggagggatcatccctatctttggtacagcaaactacgcacagaagttccagggcagagtcacgattaccgcggacgaatccacgagcacagcctacatggagctgagcagcctgagatctgaggacacggccgtgtattactgtgcgagaagtgactccggatatagtggctacgggtactttgactactggggccagggaaccctggtcaccgtgtcctca

SEQ ID NO: 944 - protein, 122 aa, Artificial Sequence
  YU505-A05 VH PRT
QVQLVQSGAEVKKPGSSVKVSCKASGGTFSSYAISWVRQAPGQGLEWMGGIIPIFGTANYAQKFQGRVTITADESTSTAYMELSSLRSEDTAVYYCARSDSGYSGYGYFDYWGQGTLVTVSS

SEQ ID NO: 945 - DNA, 1350 bp, Artificial Sequence
  YU505-A05 VH complete DNA
caggtgcagctggtgcagtctggggctgaggtgaagaagcctgggtcctcggtgaaggtctcctgcaaggcttctggaggcaccttcagcagctatgctatcagctgggtgcgacaggcccctggacaagggcttgagtggatgggagggatcatccctatctttggtacagcaaactacgcacagaagttccagggcagagtcacgattaccgcggacgaatccacgagcacagcctacatggagctgagcagcctgagatctgaggacacggccgtgtattactgtgcgagaagtgactccggatatagtggctacgggtactttgactactggggccagggaaccctggtcaccgtgtcctcagctagcaccaagggcccatcggtcttccccctggcaccctcctccaagagcacctctgggggcacagcggccctgggctgcctggtcaaggactacttccccgaaccggtgacggtgtcgtggaactcaggcgccctgaccagcggcgtgcacaccttcccggctgtcctacagtcctcaggactctactccctcagcagcgtggtgaccgtgccctccagcagcttgggcacccagacctacatctgcaacgtgaatcacaagcccagcaacaccaaggtggacaagaaagttgagcccaaatcttgtgacaaaactcacacatgcccaccgtgcccagcacctccagtggccggaccgtcagtcttcctcttccccccaaaacccaaggacaccctcatgatctcccggacccctgaggtcacatgcgtggtggtgggcgtgagccacgaagaccctgaggtcaagttcaactggtacgtggacggcgtggaggtgcataatgccaagacaaagccgcgggaggagcagtacaacagcacgtaccgggtggtcagcgtcctcaccgtcctgcaccaggactggctgaatggcaaggagtacaagtgcaaggtctccaacaaacagctcccatcccccatcgagaaaaccatctccaaagccaaagggcagccccgagaaccacaggtgtacaccctgcccccatcccgggatgagctgaccaagaaccaggtcagcctgacctgcctggtcaaaggcttctatcccagcgacatcgccgtggagtgggagagcaatgggcagccggagaacaactacaagaccacgcctcccgtgctggactccgacggctccttcttcctctacagcaagctcaccgtggacaagagcaggtggcagcaggggaacgtcttctcatgctccgtgatgcatgaggctctgcacaaccactacacgcagaaaagcctctccctgtccccgggt

SEQ ID NO: 946 - protein, 450 aa, Artificial Sequence
  YU505-A05 VH complete PRT
QVQLVQSGAEVKKPGSSVKVSCKASGGTFSSYAISWVRQAPGQGLEWMGGIIPIFGTANYAQKFQGRVTITADESTSTAYMELSSLRSEDTAVYYCARSDSGYSGYGYFDYWGQGTLVTVSSASTKGPSVFPLAPSSKSTSGGTAALGCLVKDYFPEPVTVSWNSGALTSGVHTFPAVLQSSGLYSLSSVVTVPSSSLGTQTYICNVNHKPSNTKVDKKVEPKSCDKTHTCPPCPAPPVAGPSVFLFPPKPKDTLMISRTPEVTCVVVGVSHEDPEVKFNWYVDGVEVHNAKTKPREEQYNSTYRVVSVLTVLHQDWLNGKEYKCKVSNKQLPSPIEKTISKAKGQPREPQVYTLPPSRDELTKNQVSLTCLVKGFYPSDIAVEWESNGQPENNYKTTPPVLDSDGSFFLYSKLTVDKSRWQQGNVFSCSVMHEALHNHYTQKSLSLSPG

SEQ ID NO: 947 - DNA, 651 bp, Artificial Sequence
  YU505-A05 VL complete DNA
cagtctgccctgactcagcctgcctccgtgtctgggtctcccggacagtcgatctccatctcctgcactggaaccagcagcgacgttggtcgttataactatgtctcctggtaccaacagcacccaggcaaagcccccaaactcatgatttatgatgtcactaatcggccctcaggggtttctagtcgcttctctggctccaagtctggcaacgcggcctccctgaccatctctgggctccaggctgaggacgaggctgagtattattgcacctcatatacaagcagtaacactcttgtgatattcggcggagggaccaaggtcaccgtcctaggtcagcccaaggctgcaccaagtgtcactctgttcccgccctcctctgaggagcttcaagccaacaaggccacactggtgtgtctcataagtgacttctacccgggagccgtgacagtggcctggaaggcagatagcagccccgtcaaggcgggagtggagaccaccacaccctccaaacaaagcaacaacaagtacgcggccagcagctatctgagcctgacgcctgagcagtggaagtcccacagaagctacagctgccaggtcacgcatgaagggagcaccgtggagaagacagtggcccctacagaatgttca

SEQ ID NO: 948 - protein, 217 aa, Artificial Sequence
  YU505-A05 VL complete PRT
QSALTQPASVSGSPGQSISISCTGTSSDVGRYNYVSWYQQHPGKAPKLMIYDVTNRPSGVSSRFSGSKSGNAASLTISGLQAEDEAEYYCTSYTSSNTLVIFGGGTKVTVLGQPKAAPSVTLFPPSSEELQANKATLVCLISDFYPGAVTVAWKADSSPVKAGVETTTPSKQSNNKYAASSYLSLTPEQWKSHRSYSCQVTHEGSTVEKTVAPTECS

SEQ ID NO: 949 - DNA, 18 bp, Artificial Sequence
  YU505-B03 HCDR1 DNA
agtagtaactggtggagt

SEQ ID NO: 950 - protein, 6 aa, Artificial Sequence
  YU505-B03 HCDR1 PRT
SSNWWS

SEQ ID NO: 951 - DNA, 48 bp, Artificial Sequence
  YU505-B03 HCDR2 DNA
agtatctatcatagtgggagcacctactacaacccgtccctcaagagt

SEQ ID NO: 952 - protein, 16 aa, Artificial Sequence
  YU505-B03 HCDR2 PRT
SIYHSGSTYYNPSLKS

SEQ ID NO: 953 - DNA, 45 bp, Artificial Sequence
  YU505-B03 HCDR3 DNA
gttcgccccgagaggaggtttccttactactactacatggacgtc

SEQ ID NO: 954 - protein, 15 aa, Artificial Sequence
  YU505-B03 HCDR3 PRT
VRPERRFPYYYYMDV

SEQ ID NO: 955 - DNA, 39 bp, Artificial Sequence
  YU505-B03 LCDR1 DNA
tctggaagcaactccaacatcggaactaatactgtaaac

SEQ ID NO: 956 - protein, 13 aa, Artificial Sequence
  YU505-B03 LCDR1 PRT
SGSNSNIGTNTVN

SEQ ID NO: 957 - DNA, 21 bp, Artificial Sequence
  YU505-B03 LCDR2 DNA
actaatgatcagcggccctca

SEQ ID NO: 958 - protein, 7 aa, Artificial Sequence
  YU505-B03 LCDR2 PRT
TNDQRPS

SEQ ID NO: 959 - DNA, 33 bp, Artificial Sequence
  YU505-B03 LCDR3 DNA
gcagcatgggatgacagcctgagtcgttgggtg

SEQ ID NO: 960 - protein, 11 aa, Artificial Sequence
  YU505-B03 LCDR3 PRT
AAWDDSLSRWV

SEQ ID NO: 961 - DNA, 330 bp, Artificial Sequence
  YU505-B03 VL DNA
cagtctgtgctgacgcagccgccctcagcgtctgggacccccgggcagagggtcaccatctcttgttctggaagcaactccaacatcggaactaatactgtaaactggtaccagcaactcccaggaacggcccccaaactcctcatctatactaatgatcagcggccctcaggggtccctgaccgattctctggctccaagtctggcacctcagcctccctggccatcagtgggctccagtccgacgatgaggctgattattactgtgcagcatgggatgacagcctgagtcgttgggtgttcggcggagggaccaaggtcaccgtccta

SEQ ID NO: 962 - protein, 110 aa, Artificial Sequence
  YU505-B03 VL PRT
QSVLTQPPSASGTPGQRVTISCSGSNSNIGTNTVNWYQQLPGTAPKLLIYTNDQRPSGVPDRFSGSKSGTSASLAISGLQSDDEADYYCAAWDDSLSRWVFGGGTKVTVL

SEQ ID NO: 963 - DNA, 372 bp, Artificial Sequence
  YU505-B03 VH DNA
caggtgcagctgcaggagtcgggcccaggactggtgaagccttcggggaccctgtccctcacctgcgctgtctctggtggctccatcagcagtagtaactggtggagttgggtccgccagcccccagggaaggggctggagtggattgggagtatctatcatagtgggagcacctactacaacccgtccctcaagagtcgagtcaccatatcagtagacaagtccaagaaccagttctccctgaagctgagctctgtgaccgccgcggacacggccgtgtattactgtgccagagttcgccccgagaggaggtttccttactactactacatggacgtctggggcaaagggaccacggtcaccgtgtcctca

SEQ ID NO: 964 - protein, 124 aa, Artificial Sequence
  YU505-B03 VH PRT
QVQLQESGPGLVKPSGTLSLTCAVSGGSISSSNWWSWVRQPPGKGLEWIGSIYHSGSTYYNPSLKSRVTISVDKSKNQFSLKLSSVTAADTAVYYCARVRPERRFPYYYYMDVWGKGTTVTVSS

SEQ ID NO: 965 - DNA, 1356 bp, Artificial Sequence
  YU505-B03 VH complete DNA
caggtgcagctgcaggagtcgggcccaggactggtgaagccttcggggaccctgtccctcacctgcgctgtctctggtggctccatcagcagtagtaactggtggagttgggtccgccagcccccagggaaggggctggagtggattgggagtatctatcatagtgggagcacctactacaacccgtccctcaagagtcgagtcaccatatcagtagacaagtccaagaaccagttctccctgaagctgagctctgtgaccgccgcggacacggccgtgtattactgtgccagagttcgccccgagaggaggtttccttactactactacatggacgtctggggcaaagggaccacggtcaccgtgtcctcagctagcaccaagggcccatcggtcttccccctggcaccctcctccaagagcacctctgggggcacagcggccctgggctgcctggtcaaggactacttccccgaaccggtgacggtgtcgtggaactcaggcgccctgaccagcggcgtgcacaccttcccggctgtcctacagtcctcaggactctactccctcagcagcgtggtgaccgtgccctccagcagcttgggcacccagacctacatctgcaacgtgaatcacaagcccagcaacaccaaggtggacaagaaagttgagcccaaatcttgtgacaaaactcacacatgcccaccgtgcccagcacctccagtggccggaccgtcagtcttcctcttccccccaaaacccaaggacaccctcatgatctcccggacccctgaggtcacatgcgtggtggtgggcgtgagccacgaagaccctgaggtcaagttcaactggtacgtggacggcgtggaggtgcataatgccaagacaaagccgcgggaggagcagtacaacagcacgtaccgggtggtcagcgtcctcaccgtcctgcaccaggactggctgaatggcaaggagtacaagtgcaaggtctccaacaaacagctcccatcccccatcgagaaaaccatctccaaagccaaagggcagccccgagaaccacaggtgtacaccctgcccccatcccgggatgagctgaccaagaaccaggtcagcctgacctgcctggtcaaaggcttctatcccagcgacatcgccgtggagtgggagagcaatgggcagccggagaacaactacaagaccacgcctcccgtgctggactccgacggctccttcttcctctacagcaagctcaccgtggacaagagcaggtggcagcaggggaacgtcttctcatgctccgtgatgcatgaggctctgcacaaccactacacgcagaaaagcctctccctgtccccgggt

SEQ ID NO: 966 - protein, 452 aa, Artificial Sequence
  YU505-B03 VH complete PRT
QVQLQESGPGLVKPSGTLSLTCAVSGGSISSSNWWSWVRQPPGKGLEWIGSIYHSGSTYYNPSLKSRVTISVDKSKNQFSLKLSSVTAADTAVYYCARVRPERRFPYYYYMDVWGKGTTVTVSSASTKGPSVFPLAPSSKSTSGGTAALGCLVKDYFPEPVTVSWNSGALTSGVHTFPAVLQSSGLYSLSSVVTVPSSSLGTQTYICNVNHKPSNTKVDKKVEPKSCDKTHTCPPCPAPPVAGPSVFLFPPKPKDTLMISRTPEVTCVVVGVSHEDPEVKFNWYVDGVEVHNAKTKPREEQYNSTYRVVSVLTVLHQDWLNGKEYKCKVSNKQLPSPIEKTISKAKGQPREPQVYTLPPSRDELTKNQVSLTCLVKGFYPSDIAVEWESNGQPENNYKTTPPVLDSDGSFFLYSKLTVDKSRWQQGNVFSCSVMHEALHNHYTQKSLSLSPG

SEQ ID NO: 967 - DNA, 648 bp, Artificial Sequence
  YU505-B03 VL complete DNA
cagtctgtgctgacgcagccgccctcagcgtctgggacccccgggcagagggtcaccatctcttgttctggaagcaactccaacatcggaactaatactgtaaactggtaccagcaactcccaggaacggcccccaaactcctcatctatactaatgatcagcggccctcaggggtccctgaccgattctctggctccaagtctggcacctcagcctccctggccatcagtgggctccagtccgacgatgaggctgattattactgtgcagcatgggatgacagcctgagtcgttgggtgttcggcggagggaccaaggtcaccgtcctaggtcagcccaaggctgcaccaagtgtcactctgttcccgccctcctctgaggagcttcaagccaacaaggccacactggtgtgtctcataagtgacttctacccgggagccgtgacagtggcctggaaggcagatagcagccccgtcaaggcgggagtggagaccaccacaccctccaaacaaagcaacaacaagtacgcggccagcagctatctgagcctgacgcctgagcagtggaagtcccacagaagctacagctgccaggtcacgcatgaagggagcaccgtggagaagacagtggcccctacagaatgttca

SEQ ID NO: 968 - protein, 216 aa, Artificial Sequence
  YU505-B03 VL complete PRT
QSVLTQPPSASGTPGQRVTISCSGSNSNIGTNTVNWYQQLPGTAPKLLIYTNDQRPSGVPDRFSGSKSGTSASLAISGLQSDDEADYYCAAWDDSLSRWVFGGGTKVTVLGQPKAAPSVTLFPPSSEELQANKATLVCLISDFYPGAVTVAWKADSSPVKAGVETTTPSKQSNNKYAASSYLSLTPEQWKSHRSYSCQVTHEGSTVEKTVAPTECS

SEQ ID NO: 969 - DNA, 15 bp, Artificial Sequence
  YU505-B04 HCDR1 DNA
agctactatatgcac

SEQ ID NO: 970 - protein, 5 aa, Artificial Sequence
  YU505-B04 HCDR1 PRT
SYYMH

SEQ ID NO: 971 - DNA, 51 bp, Artificial Sequence; identical to SEQ ID NO: 171
  YU505-B04 HCDR2 DNA

SEQ ID NO: 972 - protein, 16 aa, Artificial Sequence
  YU505-B04 HCDR2 PRT
IINPSGGSTSYAQKFQ

SEQ ID NO: 973 - DNA, 57 bp, Artificial Sequence; identical to SEQ ID NO: 893
  YU505-B04 HCDR3 DNA

SEQ ID NO: 974 - protein, 19 aa, Artificial Sequence
  YU505-B04 HCDR3 PRT
DRHYYDSSGSSQATFLFDY

SEQ ID NO: 975 - DNA, 42 bp, Artificial Sequence; identical to SEQ ID NO: 235
  YU505-B04 LCDR1 DNA

SEQ ID NO: 976 - protein, 14 aa, Artificial Sequence
  YU505-B04 LCDR1 PRT
TGSSSNIGAGYDVH

SEQ ID NO: 977 - DNA, 21 bp, Artificial Sequence
  YU505-B04 LCDR2 DNA
ggtaacagcaatcggccctca

SEQ ID NO: 978 - protein, 7 aa, Artificial Sequence
  YU505-B04 LCDR2 PRT
GNSNRPS

SEQ ID NO: 979 - DNA, 33 bp, Artificial Sequence
  YU505-B04 LCDR3 DNA
cagtcctatgacagcagcctgagtggttcgttg

SEQ ID NO: 980 - protein, 11 aa, Artificial Sequence
  YU505-B04 LCDR3 PRT
QSYDSSLSGSL

SEQ ID NO: 981 - DNA, 333 bp, Artificial Sequence
  YU505-B04 VL DNA
cagtctgtgttgacgcagccgccctcagtgtctggggccccagggcagagggtcaccatctcctgcactgggagcagctccaacatcggggcaggttatgatgtacactggtaccagcagcttccaggaacagcccccaaactcctcatctatggtaacagcaatcggccctcaggggtccctgaccgattctctggctccaagtctggcacctcagcctccctggccatcactgggctccaggctgaggatgaggctgattattactgccagtcctatgacagcagcctgagtggttcgttgttcggcggaggcacccaggtgaccgtcctc

SEQ ID NO: 982 - protein, 111 aa, Artificial Sequence
  YU505-B04 VL PRT
QSVLTQPPSVSGAPGQRVTISCTGSSSNIGAGYDVHWYQQLPGTAPKLLIYGNSNRPSGVPDRFSGSKSGTSASLAITGLQAEDEADYYCQSYDSSLSGSLFGGGTQVTVL

SEQ ID NO: 983 - DNA, 384 bp, Artificial Sequence
  YU505-B04 VH DNA
caggttcagctggtgcagtctggggctgaggtgaagaagcctggggcctcagtgaaggtttcctgcaaggcatctggatacaccttcaccagctactatatgcactgggtgcgacaggcccctggacaagggcttgagtggatgggaataatcaaccctagtggtggtagcacaagctacgcacagaagttccagggcagagtcaccatgaccagggacacgtccacgagcacagtctacatggagctgagcagcctgagatctgaggacacggccgtgtattactgtgctagagaccgccattactatgatagtagtggttcttcccaggccacctttctctttgactactggggccagggaaccctggtcaccgtgtcctca

SEQ ID NO: 984 - protein, 128 aa, Artificial Sequence; identical to SEQ ID NO: 904
  YU505-B04 VH PRT

SEQ ID NO: 985 - DNA, 1368 bp, Artificial Sequence
  YU505-B04 VH complete DNA
caggttcagctggtgcagtctggggctgaggtgaagaagcctggggcctcagtgaaggtttcctgcaaggcatctggatacaccttcaccagctactatatgcactgggtgcgacaggcccctggacaagggcttgagtggatgggaataatcaaccctagtggtggtagcacaagctacgcacagaagttccagggcagagtcaccatgaccagggacacgtccacgagcacagtctacatggagctgagcagcctgagatctgaggacacggccgtgtattactgtgctagagaccgccattactatgatagtagtggttcttcccaggccacctttctctttgactactggggccagggaaccctggtcaccgtgtcctcagctagcaccaagggcccatcggtcttccccctggcaccctcctccaagagcacctctgggggcacagcggccctgggctgcctggtcaaggactacttccccgaaccggtgacggtgtcgtggaactcaggcgccctgaccagcggcgtgcacaccttcccggctgtcctacagtcctcaggactctactccctcagcagcgtggtgaccgtgccctccagcagcttgggcacccagacctacatctgcaacgtgaatcacaagcccagcaacaccaaggtggacaagaaagttgagcccaaatcttgtgacaaaactcacacatgcccaccgtgcccagcacctccagtggccggaccgtcagtcttcctcttccccccaaaacccaaggacaccctcatgatctcccggacccctgaggtcacatgcgtggtggtgggcgtgagccacgaagaccctgaggtcaagttcaactggtacgtggacggcgtggaggtgcataatgccaagacaaagccgcgggaggagcagtacaacagcacgtaccgggtggtcagcgtcctcaccgtcctgcaccaggactggctgaatggcaaggagtacaagtgcaaggtctccaacaaacagctcccatcccccatcgagaaaaccatctccaaagccaaagggcagccccgagaaccacaggtgtacaccctgcccccatcccgggatgagctgaccaagaaccaggtcagcctgacctgcctggtcaaaggcttctatcccagcgacatcgccgtggagtgggagagcaatgggcagccggagaacaactacaagaccacgcctcccgtgctggactccgacggctccttcttcctctacagcaagctcaccgtggacaagagcaggtggcagcaggggaacgtcttctcatgctccgtgatgcatgaggctctgcacaaccactacacgcagaaaagcctctccctgtccccgggt

SEQ ID NO: 986 - protein, 456 aa, Artificial Sequence; identical to SEQ ID NO: 906
  YU505-B04 VH complete PRT

SEQ ID NO: 987 - DNA, 651 bp, Artificial Sequence
  YU505-B04 VL complete DNA
cagtctgtgttgacgcagccgccctcagtgtctggggccccagggcagagggtcaccatctcctgcactgggagcagctccaacatcggggcaggttatgatgtacactggtaccagcagcttccaggaacagcccccaaactcctcatctatggtaacagcaatcggccctcaggggtccctgaccgattctctggctccaagtctggcacctcagcctccctggccatcactgggctccaggctgaggatgaggctgattattactgccagtcctatgacagcagcctgagtggttcgttgttcggcggaggcacccaggtgaccgtcctcggtcagcccaaggctgcaccaagtgtcactctgttcccgccctcctctgaggagcttcaagccaacaaggccacactggtgtgtctcataagtgacttctacccgggagccgtgacagtggcctggaaggcagatagcagccccgtcaaggcgggagtggagaccaccacaccctccaaacaaagcaacaacaagtacgcggccagcagctatctgagcctgacgcctgagcagtggaagtcccacagaagctacagctgccaggtcacgcatgaagggagcaccgtggagaagacagtggcccctacagaatgttca

SEQ ID NO: 988 - protein, 217 aa, Artificial Sequence
  YU505-B04 VL complete PRT
QSVLTQPPSVSGAPGQRVTISCTGSSSNIGAGYDVHWYQQLPGTAPKLLIYGNSNRPSGVPDRFSGSKSGTSASLAITGLQAEDEADYYCQSYDSSLSGSLFGGGTQVTVLGQPKAAPSVTLFPPSSEELQANKATLVCLISDFYPGAVTVAWKADSSPVKAGVETTTPSKQSNNKYAASSYLSLTPEQWKSHRSYSCQVTHEGSTVEKTVAPTECS

SEQ ID NO: 989 - DNA, 15 bp, Artificial Sequence
  YU505-B06 HCDR1 DNA
agctatgccatgagc

SEQ ID NO: 990 - protein, 5 aa, Artificial Sequence
  YU505-B06 HCDR1 PRT
SYAMS

SEQ ID NO: 991 - DNA, 51 bp, Artificial Sequence; identical to SEQ ID NO: 131
  YU505-B06 HCDR2 DNA

SEQ ID NO: 992 - protein, 16 aa, Artificial Sequence
  YU505-B06 HCDR2 PRT
AISGSGGSTYYADSVK

SEQ ID NO: 993 - DNA, 27 bp, Artificial Sequence
  YU505-B06 HCDR3 DNA
cctattgaccacgggatttttgactac

SEQ ID NO: 994 - protein, 9 aa, Artificial Sequence
  YU505-B06 HCDR3 PRT
PIDHGIFDY

SEQ ID NO: 995 - DNA, 33 bp, Artificial Sequence; identical to SEQ ID NO: 775
  YU505-B06 LCDR1 DNA

SEQ ID NO: 996 - protein, 11 aa, Artificial Sequence
  YU505-B06 LCDR1 PRT
GGNNIGSKSVH

SEQ ID NO: 997 - DNA, 21 bp, Artificial Sequence
  YU505-B06 LCDR2 DNA
tatgatagcgaccggccctca

SEQ ID NO: 998 - protein, 7 aa, Artificial Sequence
  YU505-B06 LCDR2 PRT
YDSDRPS

SEQ ID NO: 999 - DNA, 33 bp, Artificial Sequence
  YU505-B06 LCDR3 DNA
caggtgtgggatagtagtagtgatcatgtggta

SEQ ID NO: 1000 - protein, 11 aa, Artificial Sequence
  YU505-B06 LCDR3 PRT
QVWDSSSDHVV

SEQ ID NO: 1001 - DNA, 324 bp, Artificial Sequence
  YU505-B06 VL DNA
tcctatgtgctgactcagccaccctcagtgtcagtggccccaggaaagacggccaggattacctgtgggggaaacaacattggaagtaaaagtgtgcactggtaccagcagaagccaggccaggcccctgtgctggtcatctattatgatagcgaccggccctcagggatccctgagcgattctctggctccaactctgggaacacggccaccctgaccatcagcagggtcgaagccggggatgaggccgactattactgtcaggtgtgggatagtagtagtgatcatgtggtattcggcggagggaccaagctgaccgtccta

SEQ ID NO: 1002 - protein, 108 aa, Artificial Sequence
  YU505-B06 VL PRT
SYVLTQPPSVSVAPGKTARITCGGNNIGSKSVHWYQQKPGQAPVLVIYYDSDRPSGIPERFSGSNSGNTATLTISRVEAGDEADYYCQVWDSSSDHVVFGGGTKLTVL

SEQ ID NO: 1003 - DNA, 354 bp, Artificial Sequence
  YU505-B06 VH DNA
caggttcagctggtgcagtctgggggaggcttggtacagcctggggggtccctgagactctcctgtgcagcctctggattcacctttagcagctatgccatgagctgggtccgccaggctccagggaaggggctggagtgggtctcagctattagtggtagtggtggtagcacatactacgcagactccgtgaagggccggttcaccatctccagagacaattccaagaacacgctgtatctgcaaatgaacagcctgagagccgaggacacggccgtatattactgtgcgaaacctattgaccacgggatttttgactactggggccagggaaccctggtcaccgtgtcctca

SEQ ID NO: 1004 - protein, 118 aa, Artificial Sequence
  YU505-B06 VH PRT
QVQLVQSGGGLVQPGGSLRLSCAASGFTFSSYAMSWVRQAPGKGLEWVSAISGSGGSTYYADSVKGRFTISRDNSKNTLYLQMNSLRAEDTAVYYCAKPIDHGIFDYWGQGTLVTVSS

SEQ ID NO: 1005 - DNA, 1338 bp, Artificial Sequence
  YU505-B06 VH complete DNA
caggttcagctggtgcagtctgggggaggcttggtacagcctggggggtccctgagactctcctgtgcagcctctggattcacctttagcagctatgccatgagctgggtccgccaggctccagggaaggggctggagtgggtctcagctattagtggtagtggtggtagcacatactacgcagactccgtgaagggccggttcaccatctccagagacaattccaagaacacgctgtatctgcaaatgaacagcctgagagccgaggacacggccgtatattactgtgcgaaacctattgaccacgggatttttgactactggggccagggaaccctggtcaccgtgtcctcagctagcaccaagggcccatcggtcttccccctggcaccctcctccaagagcacctctgggggcacagcggccctgggctgcctggtcaaggactacttccccgaaccggtgacggtgtcgtggaactcaggcgccctgaccagcggcgtgcacaccttcccggctgtcctacagtcctcaggactctactccctcagcagcgtggtgaccgtgccctccagcagcttgggcacccagacctacatctgcaacgtgaatcacaagcccagcaacaccaaggtggacaagaaagttgagcccaaatcttgtgacaaaactcacacatgcccaccgtgcccagcacctccagtggccggaccgtcagtcttcctcttccccccaaaacccaaggacaccctcatgatctcccggacccctgaggtcacatgcgtggtggtgggcgtgagccacgaagaccctgaggtcaagttcaactggtacgtggacggcgtggaggtgcataatgccaagacaaagccgcgggaggagcagtacaacagcacgtaccgggtggtcagcgtcctcaccgtcctgcaccaggactggctgaatggcaaggagtacaagtgcaaggtctccaacaaacagctcccatcccccatcgagaaaaccatctccaaagccaaagggcagccccgagaaccacaggtgtacaccctgcccccatcccgggatgagctgaccaagaaccaggtcagcctgacctgcctggtcaaaggcttctatcccagcgacatcgccgtggagtgggagagcaatgggcagccggagaacaactacaagaccacgcctcccgtgctggactccgacggctccttcttcctctacagcaagctcaccgtggacaagagcaggtggcagcaggggaacgtcttctcatgctccgtgatgcatgaggctctgcacaaccactacacgcagaaaagcctctccctgtccccgggt

SEQ ID NO: 1006 - protein, 446 aa, Artificial Sequence
  YU505-B06 VH complete PRT
QVQLVQSGGGLVQPGGSLRLSCAASGFTFSSYAMSWVRQAPGKGLEWVSAISGSGGSTYYADSVKGRFTISRDNSKNTLYLQMNSLRAEDTAVYYCAKPIDHGIFDYWGQGTLVTVSSASTKGPSVFPLAPSSKSTSGGTAALGCLVKDYFPEPVTVSWNSGALTSGVHTFPAVLQSSGLYSLSSVVTVPSSSLGTQTYICNVNHKPSNTKVDKKVEPKSCDKTHTCPPCPAPPVAGPSVFLFPPKPKDTLMISRTPEVTCVVVGVSHEDPEVKFNWYVDGVEVHNAKTKPREEQYNSTYRVVSVLTVLHQDWLNGKEYKCKVSNKQLPSPIEKTISKAKGQPREPQVYTLPPSRDELTKNQVSLTCLVKGFYPSDIAVEWESNGQPENNYKTTPPVLDSDGSFFLYSKLTVDKSRWQQGNVFSCSVMHEALHNHYTQKSLSLSPG

SEQ ID NO: 1007 - DNA, 642 bp, Artificial Sequence
  YU505-B06 VL complete DNA
tcctatgtgctgactcagccaccctcagtgtcagtggccccaggaaagacggccaggattacctgtgggggaaacaacattggaagtaaaagtgtgcactggtaccagcagaagccaggccaggcccctgtgctggtcatctattatgatagcgaccggccctcagggatccctgagcgattctctggctccaactctgggaacacggccaccctgaccatcagcagggtcgaagccggggatgaggccgactattactgtcaggtgtgggatagtagtagtgatcatgtggtattcggcggagggaccaagctgaccgtcctaggtcagcccaaggctgcaccaagtgtcactctgttcccgccctcctctgaggagcttcaagccaacaaggccacactggtgtgtctcataagtgacttctacccgggagccgtgacagtggcctggaaggcagatagcagccccgtcaaggcgggagtggagaccaccacaccctccaaacaaagcaacaacaagtacgcggccagcagctatctgagcctgacgcctgagcagtggaagtcccacagaagctacagctgccaggtcacgcatgaagggagcaccgtggagaagacagtggcccctacagaatgttca

SEQ ID NO: 1008 - protein, 214 aa, Artificial Sequence
  YU505-B06 VL complete PRT
SYVLTQPPSVSVAPGKTARITCGGNNIGSKSVHWYQQKPGQAPVLVIYYDSDRPSGIPERFSGSNSGNTATLTISRVEAGDEADYYCQVWDSSSDHVVFGGGTKLTVLGQPKAAPSVTLFPPSSEELQANKATLVCLISDFYPGAVTVAWKADSSPVKAGVETTTPSKQSNNKYAASSYLSLTPEQWKSHRSYSCQVTHEGSTVEKTVAPTECS

SEQ ID NO: 1009 - DNA, 15 bp, Artificial Sequence
  YU505-D01 HCDR1 DNA
agttatgatatcaac

SEQ ID NO: 1010 - protein, 5 aa, Artificial Sequence
  YU505-D01 HCDR1 PRT
SYDIN

SEQ ID NO: 1011 - DNA, 51 bp, Artificial Sequence
  YU505-D01 HCDR2 DNA
tggatgaaccctaacagtggtaacacaggctatgcacagaagttccagggc

SEQ ID NO: 1012 - protein, 16 aa, Artificial Sequence
  YU505-D01 HCDR2 PRT
WMNPNSGNTGYAQKFQ

SEQ ID NO: 1013 - DNA, 36 bp, Artificial Sequence
  YU505-D01 HCDR3 DNA
aactcgttaggagctgctactggctggttcgacccc

SEQ ID NO: 1014 - protein, 12 aa, Artificial Sequence
  YU505-D01 HCDR3 PRT
NSLGAATGWFDP

SEQ ID NO: 1015 - DNA, 39 bp, Artificial Sequence
  YU505-D01 LCDR1 DNA
tctggaagcagctccaacatcggaagtaattatgtatac

SEQ ID NO: 1016 - protein, 13 aa, Artificial Sequence
  YU505-D01 LCDR1 PRT
SGSSSNIGSNYVY

SEQ ID NO: 1017 - DNA, 21 bp, Artificial Sequence
  YU505-D01 LCDR2 DNA
aggaataatcagcggccctca

SEQ ID NO: 1018 - protein, 7 aa, Artificial Sequence
  YU505-D01 LCDR2 PRT
RNNQRPS

SEQ ID NO: 1019 - DNA, 24 bp, Artificial Sequence
  YU505-D01 LCDR3 DNA
gcagcatgggatgacagcctggta

SEQ ID NO: 1020 - protein, 8 aa, Artificial Sequence
  YU505-D01 LCDR3 PRT
AAWDDSLV

SEQ ID NO: 1021 - DNA, 321 bp, Artificial Sequence
  YU505-D01 VL DNA
tcctatgtgctgactcagccaccctcagcgtctgggacccccgggcagagggtcaccatctcttgttctggaagcagctccaacatcggaagtaattatgtatactggtaccagcagctcccaggaacggcccccaaactcctcatctataggaataatcagcggccctcaggggtccctgaccgattctctggctccaagtctggcacctcagcctccctggccatcagtgggctccggtccgaggatgaggctgattattactgtgcagcatgggatgacagcctggtattcggcggagggaccaaggtcaccgtccta

SEQ ID NO: 1022 - protein, 107 aa, Artificial Sequence
  YU505-D01 VL PRT
SYVLTQPPSASGTPGQRVTISCSGSSSNIGSNYVYWYQQLPGTAPKLLIYRNNQRPSGVPDRFSGSKSGTSASLAISGLRSEDEADYYCAAWDDSLVFGGGTKVTVL

SEQ ID NO: 1023 - DNA, 363 bp, Artificial Sequence
  YU505-D01 VH DNA
caggtgcagctggtgcagtctggggctgaggtgaagaagcctggggcctcagtgaaggtctcctgcaaggcttctggatacaccttcaccagttatgatatcaactgggtgcgacaggccactggacaagggcttgagtggatgggatggatgaaccctaacagtggtaacacaggctatgcacagaagttccagggcagagtcaccatgaccaggaacacctccataagcacagcctacatggagctgagcagcctgagatctgaggacacggccgtgtattactgtgcgaggaactcgttaggagctgctactggctggttcgacccctggggccagggaaccctggtcaccgtgtcctca

SEQ ID NO: 1024 - protein, 121 aa, Artificial Sequence
  YU505-D01 VH PRT
QVQLVQSGAEVKKPGASVKVSCKASGYTFTSYDINWVRQATGQGLEWMGWMNPNSGNTGYAQKFQGRVTMTRNTSISTAYMELSSLRSEDTAVYYCARNSLGAATGWFDPWGQGTLVTVSS

SEQ ID NO: 1025 - DNA, 1347 bp, Artificial Sequence
  YU505-D01 VH complete DNA
caggtgcagctggtgcagtctggggctgaggtgaagaagcctggggcctcagtgaaggtctcctgcaaggcttctggatacaccttcaccagttatgatatcaactgggtgcgacaggccactggacaagggcttgagtggatgggatggatgaaccctaacagtggtaacacaggctatgcacagaagttccagggcagagtcaccatgaccaggaacacctccataagcacagcctacatggagctgagcagcctgagatctgaggacacggccgtgtattactgtgcgaggaactcgttaggagctgctactggctggttcgacccctggggccagggaaccctggtcaccgtgtcctcagctagcaccaagggcccatcggtcttccccctggcaccctcctccaagagcacctctgggggcacagcggccctgggctgcctggtcaaggactacttccccgaaccggtgacggtgtcgtggaactcaggcgccctgaccagcggcgtgcacaccttcccggctgtcctacagtcctcaggactctactccctcagcagcgtggtgaccgtgccctccagcagcttgggcacccagacctacatctgcaacgtgaatcacaagcccagcaacaccaaggtggacaagaaagttgagcccaaatcttgtgacaaaactcacacatgcccaccgtgcccagcacctccagtggccggaccgtcagtcttcctcttccccccaaaacccaaggacaccctcatgatctcccggacccctgaggtcacatgcgtggtggtgggcgtgagccacgaagaccctgaggtcaagttcaactggtacgtggacggcgtggaggtgcataatgccaagacaaagccgcgggaggagcagtacaacagcacgtaccgggtggtcagcgtcctcaccgtcctgcaccaggactggctgaatggcaaggagtacaagtgcaaggtctccaacaaacagctcccatcccccatcgagaaaaccatctccaaagccaaagggcagccccgagaaccacaggtgtacaccctgcccccatcccgggatgagctgaccaagaaccaggtcagcctgacctgcctggtcaaaggcttctatcccagcgacatcgccgtggagtgggagagcaatgggcagccggagaacaactacaagaccacgcctcccgtgctggactccgacggctccttcttcctctacagcaagctcaccgtggacaagagcaggtggcagcaggggaacgtcttctcatgctccgtgatgcatgaggctctgcacaaccactacacgcagaaaagcctctccctgtccccgggt

SEQ ID NO: 1026 - protein, 448 aa, Artificial Sequence
  YU505-D01 VH complete PRT
QVQLVQSGAEVKKPGASVKVSCKASGYTFTSYDINWVRQATGQGLEWMGWMNPNSGNTGYAQKFQGRVTMTRNTSISTAYMELSSLRSEDTAVYYCARNSLGAATGWFDPWGQGTLVTVSSASTKGPSVFPLAPSSKSTSGGTAALGCLVKDYFPEPVTVSWNSGALTSGVHTFPAVLQSSGLYSLSSVVTVPSSSLGTQTYICNVNHKPSNTKVDKKVEPKSCDKTHTCPPCPAPPVAGPSVFLFPPKPKDTLMISRTPEVTCVVVGVSHEDPEVKFNWYVDGVEVHNAKTKPREEQYNSTYRVVSVLTVLHQDWLNGKEYKCKVSNKQLPSPIEKTISKAKGQPREPQVYTLPPSRDELTKNQVSLTCLVKGFYPSDIAVEWESNGQPENNYKTTPPVLDSDGSFFLYSKLTVDKSRWQQGNVFSCSVMHEALHNHYTQKSLSLSP

SEQ ID NO: 1027 - DNA, 639 bp, Artificial Sequence
  YU505-D01 VL complete DNA
tcctatgtgctgactcagccaccctcagcgtctgggacccccgggcagagggtcaccatctcttgttctggaagcagctccaacatcggaagtaattatgtatactggtaccagcagctcccaggaacggcccccaaactcctcatctataggaataatcagcggccctcaggggtccctgaccgattctctggctccaagtctggcacctcagcctccctggccatcagtgggctccggtccgaggatgaggctgattattactgtgcagcatgggatgacagcctggtattcggcggagggaccaaggtcaccgtcctaggtcagcccaaggctgcaccaagtgtcactctgttcccgccctcctctgaggagcttcaagccaacaaggccacactggtgtgtctcataagtgacttctacccgggagccgtgacagtggcctggaaggcagatagcagccccgtcaaggcgggagtggagaccaccacaccctccaaacaaagcaacaacaagtacgcggccagcagctatctgagcctgacgcctgagcagtggaagtcccacagaagctacagctgccaggtcacgcatgaagggagcaccgtggagaagacagtggcccctacagaatgttca

SEQ ID NO: 1028 - protein, 213 aa, Artificial Sequence
  YU505-D01 VL complete PRT
SYVLTQPPSASGTPGQRVTISCSGSSSNIGSNYVYWYQQLPGTAPKLLIYRNNQRPSGVPDRFSGSKSGTSASLAISGLRSEDEADYYCAAWDDSLVFGGGTKVTVLGQPKAAPSVTLFPPSSEELQANKATLVCLISDFYPGAVTVAWKADSSPVKAGVETTTPSKQSNNKYAASSYLSLTPEQWKSHRSYSCQVTHEGSTVEKTVAPTECS

SEQ ID NO: 1029 - DNA, 15 bp, Artificial Sequence
  YU505-D02 HCDR1 DNA
agctatgctatcagc

SEQ ID NO: 1030 - protein, 5 aa, Artificial Sequence
  YU505-D02 HCDR1 PRT
SYAIS

SEQ ID NO: 1031 - DNA, 51 bp, Artificial Sequence; identical to SEQ ID NO: 911
  YU505-D02 HCDR2 DNA

SEQ ID NO: 1032 - protein, 16 aa, Artificial Sequence
  YU505-D02 HCDR2 PRT
GIIPIFGTANYAQKFQ

SEQ ID NO: 1033 - DNA, 33 bp, Artificial Sequence
  YU505-D02 HCDR3 DNA
gaaacctccagtggctggagtttccttgactac

SEQ ID NO: 1034 - protein, 11 aa, Artificial Sequence
  YU505-D02 HCDR3 PRT
ETSSGWSFLDY

SEQ ID NO: 1035 - DNA, 33 bp, Artificial Sequence; identical to SEQ ID NO: 775
  YU505-D02 LCDR1 DNA

SEQ ID NO: 1036 - protein, 11 aa, Artificial Sequence
  YU505-D02 LCDR1 PRT
GGNNIGSKSVH

SEQ ID NO: 1037 - DNA, 21 bp, Artificial Sequence
  YU505-D02 LCDR2 DNA
tatgatagcgaccggccctca

SEQ ID NO: 1038 - protein, 7 aa, Artificial Sequence
  YU505-D02 LCDR2 PRT
YDSDRPS

SEQ ID NO: 1039 - DNA, 33 bp, Artificial Sequence; identical to SEQ ID NO: 999
  YU505-D02 LCDR3 DNA

SEQ ID NO: 1040 - protein, 11 aa, Artificial Sequence
  YU505-D02 LCDR3 PRT
QVWDSSSDHVV

SEQ ID NO: 1041 - DNA, 324 bp, Artificial Sequence
  YU505-D02 VL DNA
tcctatgtgctgactcagccaccctcagtgtcagtggccccaggaaagacggccaggattacctgtgggggaaacaacattggaagtaaaagtgtgcactggtaccagcagaagccaggccaggcccctgtgctggtcatctattatgatagcgaccggccctcagggatccctgagcgattctctggctccaactctgggaacacggccaccctgaccatcagcagggtcgaagccggggatgaggccgactattactgtcaggtgtgggatagtagtagtgatcatgtggtattcggcggagggaccaaggtcaccgtccta

SEQ ID NO: 1042 - protein, 108 aa, Artificial Sequence
  YU505-D02 VL PRT
SYVLTQPPSVSVAPGKTARITCGGNNIGSKSVHWYQQKPGQAPVLVIYYDSDRPSGIPERFSGSNSGNTATLTISRVEAGDEADYYCQVWDSSSDHVVFGGGTKVTVL

SEQ ID NO: 1043 - DNA, 360 bp, Artificial Sequence
  YU505-D02 VH DNA
caggtgcagctggtgcagtctggggctgaggtgaagaagcctgggtcctcggtgaaggtctcctgcaaggcttctggaggcaccttcagcagctatgctatcagctgggtgcgacaggcccctggacaagggcttgagtggatgggagggatcatccctatctttggtacagcaaactacgcacagaagttccagggcagagtcacgattaccgcggacaaatccacgagcacagcctacatggagctgagcagcctgagatctgaggacacggccgtgtattactgtgcgagagaaacctccagtggctggagtttccttgactactggggccagggaaccctggtcaccgtgtcctca

SEQ ID NO: 1044 - protein, 120 aa, Artificial Sequence
  YU505-D02 VH PRT
QVQLVQSGAEVKKPGSSVKVSCKASGGTFSSYAISWVRQAPGQGLEWMGGIIPIFGTANYAQKFQGRVTITADKSTSTAYMELSSLRSEDTAVYYCARETSSGWSFLDYWGQGTLVTVSS

SEQ ID NO: 1045 - DNA, 1344 bp, Artificial Sequence
  YU505-D02 VH complete DNA
caggtgcagctggtgcagtctggggctgaggtgaagaagcctgggtcctcggtgaaggtctcctgcaaggcttctggaggcaccttcagcagctatgctatcagctgggtgcgacaggcccctggacaagggcttgagtggatgggagggatcatccctatctttggtacagcaaactacgcacagaagttccagggcagagtcacgattaccgcggacaaatccacgagcacagcctacatggagctgagcagcctgagatctgaggacacggccgtgtattactgtgcgagagaaacctccagtggctggagtttccttgactactggggccagggaaccctggtcaccgtgtcctcagctagcaccaagggcccatcggtcttccccctggcaccctcctccaagagcacctctgggggcacagcggccctgggctgcctggtcaaggactacttccccgaaccggtgacggtgtcgtggaactcaggcgccctgaccagcggcgtgcacaccttcccggctgtcctacagtcctcaggactctactccctcagcagcgtggtgaccgtgccctccagcagcttgggcacccagacctacatctgcaacgtgaatcacaagcccagcaacaccaaggtggacaagaaagttgagcccaaatcttgtgacaaaactcacacatgcccaccgtgcccagcacctccagtggccggaccgtcagtcttcctcttccccccaaaacccaaggacaccctcatgatctcccggacccctgaggtcacatgcgtggtggtgggcgtgagccacgaagaccctgaggtcaagttcaactggtacgtggacggcgtggaggtgcataatgccaagacaaagccgcgggaggagcagtacaacagcacgtaccgggtggtcagcgtcctcaccgtcctgcaccaggactggctgaatggcaaggagtacaagtgcaaggtctccaacaaacagctcccatcccccatcgagaaaaccatctccaaagccaaagggcagccccgagaaccacaggtgtacaccctgcccccatcccgggatgagctgaccaagaaccaggtcagcctgacctgcctggtcaaaggcttctatcccagcgacatcgccgtggagtgggagagcaatgggcagccggagaacaactacaagaccacgcctcccgtgctggactccgacggctccttcttcctctacagcaagctcaccgtggacaagagcaggtggcagcaggggaacgtcttctcatgctccgtgatgcatgaggctctgcacaaccactacacgcagaaaagcctctccctgtccccgggt

SEQ ID NO: 1046 - protein, 448 aa, Artificial Sequence
  YU505-D02 VH complete PRT
QVQLVQSGAEVKKPGSSVKVSCKASGGTFSSYAISWVRQAPGQGLEWMGGIIPIFGTANYAQKFQGRVTITADKSTSTAYMELSSLRSEDTAVYYCARETSSGWSFLDYWGQGTLVTVSSASTKGPSVFPLAPSSKSTSGGTAALGCLVKDYFPEPVTVSWNSGALTSGVHTFPAVLQSSGLYSLSSVVTVPSSSLGTQTYICNVNHKPSNTKVDKKVEPKSCDKTHTCPPCPAPPVAGPSVFLFPPKPKDTLMISRTPEVTCVVVGVSHEDPEVKFNWYVDGVEVHNAKTKPREEQYNSTYRVVSVLTVLHQDWLNGKEYKCKVSNKQLPSPIEKTISKAKGQPREPQVYTLPPSRDELTKNQVSLTCLVKGFYPSDIAVEWESNGQPENNYKTTPPVLDSDGSFFLYSKLTVDKSRWQQGNVFSCSVMHEALHNHYTQKSLSLSPG

SEQ ID NO: 1047 - DNA, 642 bp, Artificial Sequence
  YU505-D02 VL complete DNA
tcctatgtgctgactcagccaccctcagtgtcagtggccccaggaaagacggccaggattacctgtgggggaaacaacattggaagtaaaagtgtgcactggtaccagcagaagccaggccaggcccctgtgctggtcatctattatgatagcgaccggccctcagggatccctgagcgattctctggctccaactctgggaacacggccaccctgaccatcagcagggtcgaagccggggatgaggccgactattactgtcaggtgtgggatagtagtagtgatcatgtggtattcggcggagggaccaaggtcaccgtcctaggtcagcccaaggctgcaccaagtgtcactctgttcccgccctcctctgaggagcttcaagccaacaaggccacactggtgtgtctcataagtgacttctacccgggagccgtgacagtggcctggaaggcagatagcagccccgtcaaggcgggagtggagaccaccacaccctccaaacaaagcaacaacaagtacgcggccagcagctatctgagcctgacgcctgagcagtggaagtcccacagaagctacagctgccaggtcacgcatgaagggagcaccgtggagaagacagtggcccctacagaatgttca

SEQ ID NO: 1048 - protein, 214 aa, Artificial Sequence
  YU505-D02 VL complete PRT
SYVLTQPPSVSVAPGKTARITCGGNNIGSKSVHWYQQKPGQAPVLVIYYDSDRPSGIPERFSGSNSGNTATLTISRVEAGDEADYYCQVWDSSSDHVVFGGGTKVTVLGQPKAAPSVTLFPPSSEELQANKATLVCLISDFYPGAVTVAWKADSSPVKAGVETTTPSKQSNNKYAASSYLSLTPEQWKSHRSYSCQVTHEGSTVEKTVAPTECS

SEQ ID NO: 1049 - DNA, 15 bp, Artificial Sequence
  YU505-E01 HCDR1 DNA
agttatagtattgtc

SEQ ID NO: 1050 - protein, 5 aa, Artificial Sequence
  YU505-E01 HCDR1 PRT
SYSIV

SEQ ID NO: 1051 - DNA, 51 bp, Artificial Sequence
  YU505-E01 HCDR2 DNA
gggatcatccctatttttggtactacaaactatgcacagaagttccagggc

SEQ ID NO: 1052 - protein, 16 aa, Artificial Sequence
  YU505-E01 HCDR2 PRT
GIIPIFGTTNYAQKFQ

SEQ ID NO: 1053 - DNA, 24 bp, Artificial Sequence
  YU505-E01 HCDR3 DNA
tctctgggagccactcgtgactac

SEQ ID NO: 1054 - protein, 8 aa, Artificial Sequence
  YU505-E01 HCDR3 PRT
SLGATRDY

SEQ ID NO: 1055 - DNA, 39 bp, Artificial Sequence; identical to SEQ ID NO: 155
  YU505-E01 LCDR1 DNA

SEQ ID NO: 1056 - protein, 13 aa, Artificial Sequence
  YU505-E01 LCDR1 PRT
SGSSSNIGNNAVN

SEQ ID NO: 1057 - DNA, 21 bp, Artificial Sequence
  YU505-E01 LCDR2 DNA
tatgatgatctgctgccctca

SEQ ID NO: 1058 - protein, 7 aa, Artificial Sequence
  YU505-E01 LCDR2 PRT
YDDLLPS

SEQ ID NO: 1059 - DNA, 33 bp, Artificial Sequence
  YU505-E01 LCDR3 DNA
gcagcatgggatgacagcctgaatggtccggtg

SEQ ID NO: 1060 - protein, 11 aa, Artificial Sequence
  YU505-E01 LCDR3 PRT
AAWDDSLNGPV

SEQ ID NO: 1061 - DNA, 330 bp, Artificial Sequence
  YU505-E01 VL DNA
tcctatgtgctgactcagccaccctcggtgtctgaagcccccaggcagagggtcaccatctcctgttctggaagcagctccaacatcggaaataatgctgtaaactggtaccagcagctcccaggaaaggctcccaaactcctcatctattatgatgatctgctgccctcaggggtctctgaccgattctctggctccaagtctggcacctcagcctccctggccatcagtgggctccagtctgaggatgaggctgattattactgtgcagcatgggatgacagcctgaatggtccggtgttcggcggagggaccaaggtcaccgtccta

SEQ ID NO: 1062 - protein, 110 aa, Artificial Sequence
  YU505-E01 VL PRT
SYVLTQPPSVSEAPRQRVTISCSGSSSNIGNNAVNWYQQLPGKAPKLLIYYDDLLPSGVSDRFSGSKSGTSASLAISGLQSEDEADYYCAAWDDSLNGPVFGGGTKVTVL

SEQ ID NO: 1063 - DNA, 351 bp, Artificial Sequence
  YU505-E01 VH DNA
caggttcagctggtgcagtctggagctgaggtgaagaagcctgggtcctcggtgaaggtctcctgcaaggcttctggaggcaccttcagcagttatagtattgtctgggtgcgacaggcccctggacaaggacttgagtggatgggagggatcatccctatttttggtactacaaactatgcacagaagttccagggcagagtcacgattaccgcggacgaatccacaagcacagccttcatggagctgagcaacctaaaatctgaggacacggccgtctatttctgtgcgagatctctgggagccactcgtgactactggggccagggaaccctggtcaccgtgtcctca

SEQ ID NO: 1064 - protein, 117 aa, Artificial Sequence
  YU505-E01 VH PRT
QVQLVQSGAEVKKPGSSVKVSCKASGGTFSSYSIVWVRQAPGQGLEWMGGIIPIFGTTNYAQKFQGRVTITADESTSTAFMELSNLKSEDTAVYFCARSLGATRDYWGQGTLVTVSS

SEQ ID NO: 1065 - DNA, 1335 bp, Artificial Sequence
  YU505-E01 VH complete DNA
caggttcagctggtgcagtctggagctgaggtgaagaagcctgggtcctcggtgaaggtctcctgcaaggcttctggaggcaccttcagcagttatagtattgtctgggtgcgacaggcccctggacaaggacttgagtggatgggagggatcatccctatttttggtactacaaactatgcacagaagttccagggcagagtcacgattaccgcggacgaatccacaagcacagccttcatggagctgagcaacctaaaatctgaggacacggccgtctatttctgtgcgagatctctgggagccactcgtgactactggggccagggaaccctggtcaccgtgtcctcagctagcaccaagggcccatcggtcttccccctggcaccctcctccaagagcacctctgggggcacagcggccctgggctgcctggtcaaggactacttccccgaaccggtgacggtgtcgtggaactcaggcgccctgaccagcggcgtgcacaccttcccggctgtcctacagtcctcaggactctactccctcagcagcgtggtgaccgtgccctccagcagcttgggcacccagacctacatctgcaacgtgaatcacaagcccagcaacaccaaggtggacaagaaagttgagcccaaatcttgtgacaaaactcacacatgcccaccgtgcccagcacctccagtggccggaccgtcagtcttcctcttccccccaaaacccaaggacaccctcatgatctcccggacccctgaggtcacatgcgtggtggtgggcgtgagccacgaagaccctgaggtcaagttcaactggtacgtggacggcgtggaggtgcataatgccaagacaaagccgcgggaggagcagtacaacagcacgtaccgggtggtcagcgtcctcaccgtcctgcaccaggactggctgaatggcaaggagtacaagtgcaaggtctccaacaaacagctcccatcccccatcgagaaaaccatctccaaagccaaagggcagccccgagaaccacaggtgtacaccctgcccccatcccgggatgagctgaccaagaaccaggtcagcctgacctgcctggtcaaaggcttctatcccagcgacatcgccgtggagtgggagagcaatgggcagccggagaacaactacaagaccacgcctcccgtgctggactccgacggctccttcttcctctacagcaagctcaccgtggacaagagcaggtggcagcaggggaacgtcttctcatgctccgtgatgcatgaggctctgcacaaccactacacgcagaaaagcctctccctgtccccgggt

SEQ ID NO: 1066 - protein, 445 aa, Artificial Sequence
  YU505-E01 VH complete PRT
QVQLVQSGAEVKKPGSSVKVSCKASGGTFSSYSIVWVRQAPGQGLEWMGGIIPIFGTTNYAQKFQGRVTITADESTSTAFMELSNLKSEDTAVYFCARSLGATRDYWGQGTLVTVSSASTKGPSVFPLAPSSKSTSGGTAALGCLVKDYFPEPVTVSWNSGALTSGVHTFPAVLQSSGLYSLSSVVTVPSSSLGTQTYICNVNHKPSNTKVDKKVEPKSCDKTHTCPPCPAPPVAGPSVFLFPPKPKDTLMISRTPEVTCVVVGVSHEDPEVKFNWYVDGVEVHNAKTKPREEQYNSTYRVVSVLTVLHQDWLNGKEYKCKVSNKQLPSPIEKTISKAKGQPREPQVYTLPPSRDELTKNQVSLTCLVKGFYPSDIAVEWESNGQPENNYKTTPPVLDSDGSFFLYSKLTVDKSRWQQGNVFSCSVMHEALHNHYTQKSLSLSPG

SEQ ID NO: 1067 - DNA, 648 bp, Artificial Sequence
  YU505-E01 VL complete DNA
tcctatgtgctgactcagccaccctcggtgtctgaagcccccaggcagagggtcaccatctcctgttctggaagcagctccaacatcggaaataatgctgtaaactggtaccagcagctcccaggaaaggctcccaaactcctcatctattatgatgatctgctgccctcaggggtctctgaccgattctctggctccaagtctggcacctcagcctccctggccatcagtgggctccagtctgaggatgaggctgattattactgtgcagcatgggatgacagcctgaatggtccggtgttcggcggagggaccaaggtcaccgtcctaggtcagcccaaggctgcaccaagtgtcactctgttcccgccctcctctgaggagcttcaagccaacaaggccacactggtgtgtctcataagtgacttctacccgggagccgtgacagtggcctggaaggcagatagcagccccgtcaaggcgggagtggagaccaccacaccctccaaacaaagcaacaacaagtacgcggccagcagctatctgagcctgacgcctgagcagtggaagtcccacagaagctacagctgccaggtcacgcatgaagggagcaccgtggagaagacagtggcccctacagaatgttca

SEQ ID NO: 1068 - protein, 216 aa, Artificial Sequence
  YU505-E01 VL complete PRT
SYVLTQPPSVSEAPRQRVTISCSGSSSNIGNNAVNWYQQLPGKAPKLLIYYDDLLPSGVSDRFSGSKSGTSASLAISGLQSEDEADYYCAAWDDSLNGPVFGGGTKVTVLGQPKAAPSVTLFPPSSEELQANKATLVCLISDFYPGAVTVAWKADSSPVKAGVETTTPSKQSNNKYAASSYLSLTPEQWKSHRSYSCQVTHEGSTVEKTVAPTECS

SEQ ID NO: 1069 - DNA, 15 bp, Artificial Sequence
  YU505-E02 HCDR1 DNA
agctatactatcagc

SEQ ID NO: 1070 - protein, 5 aa, Artificial Sequence
  YU505-E02 HCDR1 PRT
SYTIS

SEQ ID NO: 1071 - DNA, 51 bp, Artificial Sequence
  YU505-E02 HCDR2 DNA
aggatcatccctatccttggtatagcaaactacgcacagaagttccagggc

SEQ ID NO: 1072 - protein, 16 aa, Artificial Sequence
  YU505-E02 HCDR2 PRT
RIIPILGIANYAQKFQ

SEQ ID NO: 1073 - DNA, 45 bp, Artificial Sequence
  YU505-E02 HCDR3 DNA
gatatggtctctgtaggggcagctggaccttactactttgactac

SEQ ID NO: 1074 - protein, 15 aa, Artificial Sequence
  YU505-E02 HCDR3 PRT
DMVSVGAAGPYYFDY

SEQ ID NO: 1075 - DNA, 42 bp, Artificial Sequence; identical to SEQ ID NO: 235
  YU505-E02 LCDR1 DNA

SEQ ID NO: 1076 - protein, 14 aa, Artificial Sequence
  YU505-E02 LCDR1 PRT
TGSSSNIGAGYDVH

SEQ ID NO: 1077 - DNA, 21 bp, Artificial Sequence
  YU505-E02 LCDR2 DNA
ggtaacagcaatcggccctca

SEQ ID NO: 1078 - protein, 7 aa, Artificial Sequence
  YU505-E02 LCDR2 PRT
GNSNRPS

SEQ ID NO: 1079 - DNA, 33 bp, Artificial Sequence; identical to SEQ ID NO: 499
  YU505-E02 LCDR3 DNA

SEQ ID NO: 1080 - protein, 11 aa, Artificial Sequence
  YU505-E02 LCDR3 PRT
QSYDSSLSGSV

SEQ ID NO: 1081 - DNA, 333 bp, Artificial Sequence
  YU505-E02 VL DNA
cagtctgtgttgacgcagccgccctcggtgtctgaagcccccaggcagagggtcaccatctcctgcactgggagcagctccaacatcggggcaggttatgatgtacactggtaccagcagcttccaggaacagcccccaaactcctcatctatggtaacagcaatcggccctcaggggtccctgaccgattctctggctccaagtctgtcacctcagcctccctggccatcactgggctccaggctgaggatgaggctgattattactgccagtcctatgacagcagcctgagtggttcggtattcggcggagggaccaagctgaccgtccta

SEQ ID NO: 1082 - protein, 111 aa, Artificial Sequence
  YU505-E02 VL PRT
QSVLTQPPSVSEAPRQRVTISCTGSSSNIGAGYDVHWYQQLPGTAPKLLIYGNSNRPSGVPDRFSGSKSVTSASLAITGLQAEDEADYYCQSYDSSLSGSVFGGGTKLTVL

SEQ ID NO: 1083 - DNA, 372 bp, Artificial Sequence
  YU505-E02 VH DNA
caggttcagctggtgcagtctggggctgaggtgaagaagcctgggtcctcggtgaaggtctcctgcaaggcttctggaggcaccttcagcagctatactatcagctgggtgcgacaggcccctggacaagggcttgagtggatgggaaggatcatccctatccttggtatagcaaactacgcacagaagttccagggcagagtcacgattaccgcggacaaatccacgagcacagcctacatggagctgagcagcctgagatctgaggacacggccgtgtattactgtgcgagagatatggtctctgtaggggcagctggaccttactactttgactactggggccagggaaccctggtcaccgtgtcctca

SEQ ID NO: 1084 - protein, 124 aa, Artificial Sequence
  YU505-E02 VH PRT
QVQLVQSGAEVKKPGSSVKVSCKASGGTFSSYTISWVRQAPGQGLEWMGRIIPILGIANYAQKFQGRVTITADKSTSTAYMELSSLRSEDTAVYYCARDMVSVGAAGPYYFDYWGQGTLVTVSS

SEQ ID NO: 1085 - DNA, 1356 bp, Artificial Sequence
  YU505-E02 VH complete DNA
caggttcagctggtgcagtctggggctgaggtgaagaagcctgggtcctcggtgaaggtctcctgcaaggcttctggaggcaccttcagcagctatactatcagctgggtgcgacaggcccctggacaagggcttgagtggatgggaaggatcatccctatccttggtatagcaaactacgcacagaagttccagggcagagtcacgattaccgcggacaaatccacgagcacagcctacatggagctgagcagcctgagatctgaggacacggccgtgtattactgtgcgagagatatggtctctgtaggggcagctggaccttactactttgactactggggccagggaaccctggtcaccgtgtcctcagctagcaccaagggcccatcggtcttccccctggcaccctcctccaagagcacctctgggggcacagcggccctgggctgcctggtcaaggactacttccccgaaccggtgacggtgtcgtggaactcaggcgccctgaccagcggcgtgcacaccttcccggctgtcctacagtcctcaggactctactccctcagcagcgtggtgaccgtgccctccagcagcttgggcacccagacctacatctgcaacgtgaatcacaagcccagcaacaccaaggtggacaagaaagttgagcccaaatcttgtgacaaaactcacacatgcccaccgtgcccagcacctccagtggccggaccgtcagtcttcctcttccccccaaaacccaaggacaccctcatgatctcccggacccctgaggtcacatgcgtggtggtgggcgtgagccacgaagaccctgaggtcaagttcaactggtacgtggacggcgtggaggtgcataatgccaagacaaagccgcgggaggagcagtacaacagcacgtaccgggtggtcagcgtcctcaccgtcctgcaccaggactggctgaatggcaaggagtacaagtgcaaggtctccaacaaacagctcccatcccccatcgagaaaaccatctccaaagccaaagggcagccccgagaaccacaggtgtacaccctgcccccatcccgggatgagctgaccaagaaccaggtcagcctgacctgcctggtcaaaggcttctatcccagcgacatcgccgtggagtgggagagcaatgggcagccggagaacaactacaagaccacgcctcccgtgctggactccgacggctccttcttcctctacagcaagctcaccgtggacaagagcaggtggcagcaggggaacgtcttctcatgctccgtgatgcatgaggctctgcacaaccactacacgcagaaaagcctctccctgtccccgggt

SEQ ID NO: 1086 - protein, 452 aa, Artificial Sequence
  YU505-E02 VH complete PRT
QVQLVQSGAEVKKPGSSVKVSCKASGGTFSSYTISWVRQAPGQGLEWMGRIIPILGIANYAQKFQGRVTITADKSTSTAYMELSSLRSEDTAVYYCARDMVSVGAAGPYYFDYWGQGTLVTVSSASTKGPSVFPLAPSSKSTSGGTAALGCLVKDYFPEPVTVSWNSGALTSGVHTFPAVLQSSGLYSLSSVVTVPSSSLGTQTYICNVNHKPSNTKVDKKVEPKSCDKTHTCPPCPAPPVAGPSVFLFPPKPKDTLMISRTPEVTCVVVGVSHEDPEVKFNWYVDGVEVHNAKTKPREEQYNSTYRVVSVLTVLHQDWLNGKEYKCKVSNKQLPSPIEKTISKAKGQPREPQVYTLPPSRDELTKNQVSLTCLVKGFYPSDIAVEWESNGQPENNYKTTPPVLDSDGSFFLYSKLTVDKSRWQQGNVFSCSVMHEALHNHYTQKSLSLSPG

SEQ ID NO: 1087 - DNA, 651 bp, Artificial Sequence
  YU505-E02 VL complete DNA
cagtctgtgttgacgcagccgccctcggtgtctgaagcccccaggcagagggtcaccatctcctgcactgggagcagctccaacatcggggcaggttatgatgtacactggtaccagcagcttccaggaacagcccccaaactcctcatctatggtaacagcaatcggccctcaggggtccctgaccgattctctggctccaagtctgtcacctcagcctccctggccatcactgggctccaggctgaggatgaggctgattattactgccagtcctatgacagcagcctgagtggttcggtattcggcggagggaccaagctgaccgtcctaggtcagcccaaggctgcaccaagtgtcactctgttcccgccctcctctgaggagcttcaagccaacaaggccacactggtgtgtctcataagtgacttctacccgggagccgtgacagtggcctggaaggcagatagcagccccgtcaaggcgggagtggagaccaccacaccctccaaacaaagcaacaacaagtacgcggccagcagctatctgagcctgacgcctgagcagtggaagtcccacagaagctacagctgccaggtcacgcatgaagggagcaccgtggagaagacagtggcccctacagaatgttca

SEQ ID NO: 1088 - protein, 217 aa, Artificial Sequence
  YU505-E02 VL complete PRT
QSVLTQPPSVSEAPRQRVTISCTGSSSNIGAGYDVHWYQQLPGTAPKLLIYGNSNRPSGVPDRFSGSKSVTSASLAITGLQAEDEADYYCQSYDSSLSGSVFGGGTKLTVLGQPKAAPSVTLFPPSSEELQANKATLVCLISDFYPGAVTVAWKADSSPVKAGVETTTPSKQSNNKYAASSYLSLTPEQWKSHRSYSCQVTHEGSTVEKTVAPTECS

SEQ ID NO: 1089 - DNA, 15 bp, Artificial Sequence
  YU505-E04 HCDR1 DNA
agctatgctatcagc

SEQ ID NO: 1090 - protein, 5 aa, Artificial Sequence
  YU505-E04 HCDR1 PRT
SYAIS

SEQ ID NO: 1091 - DNA, 51 bp, Artificial Sequence; identical to SEQ ID NO: 911
  YU505-E04 HCDR2 DNA

SEQ ID NO: 1092 - protein, 16 aa, Artificial Sequence
  YU505-E04 HCDR2 PRT
GIIPIFGTANYAQKFQ

SEQ ID NO: 1093 - DNA, 30 bp, Artificial Sequence
  YU505-E04 HCDR3 DNA
ggacgtggatacagctatggtcacgactac

SEQ ID NO: 1094 - protein, 10 aa, Artificial Sequence
  YU505-E04 HCDR3 PRT
GRGYSYGHDY

SEQ ID NO: 1095 - DNA, 39 bp, Artificial Sequence; identical to SEQ ID NO: 155
  YU505-E04 LCDR1 DNA

SEQ ID NO: 1096 - protein, 13 aa, Artificial Sequence
  YU505-E04 LCDR1 PRT
SGSSSNIGNNAVN

SEQ ID NO: 1097 - DNA, 21 bp, Artificial Sequence
  YU505-E04 LCDR2 DNA
tatgatgatctgctgccctca

SEQ ID NO: 1098 - protein, 7 aa, Artificial Sequence
  YU505-E04 LCDR2 PRT
YDDLLPS

SEQ ID NO: 1099 - DNA, 33 bp, Artificial Sequence
  YU505-E04 LCDR3 DNA
gcagcctgggatgacagcctgaatggttgggtg

SEQ ID NO: 1100 - protein, 11 aa, Artificial Sequence
  YU505-E04 LCDR3 PRT
AAWDDSLNGWV

SEQ ID NO: 1101 - DNA, 330 bp, Artificial Sequence
  YU505-E04 VL DNA
tcctatgagctgactcagccaccctcggtgtctgaagcccccaggcagagggtcaccatctcctgttctggaagcagctccaacatcggaaataatgctgtaaactggtaccagcagttcccaggaaaggctcccaaactcctcatctattatgatgatctgctgccctcaggggtctctgaccgattctctggctccaagtctggcacctcagcctccctggccatcagtgggctccagtctgaggatgaggctgattattactgtgcagcctgggatgacagcctgaatggttgggtgttcggcggagggaccaagctgaccgtccta

SEQ ID NO: 1102 - protein, 110 aa, Artificial Sequence
  YU505-E04 VL PRT
SYELTQPPSVSEAPRQRVTISCSGSSSNIGNNAVNWYQQFPGKAPKLLIYYDDLLPSGVSDRFSGSKSGTSASLAISGLQSEDEADYYCAAWDDSLNGWVFGGGTKLTVL

SEQ ID NO: 1103 - DNA, 357 bp, Artificial Sequence
  YU505-E04 VH DNA
caggttcagctggtgcagtctggggctgaggtgaagaagcctgggtcctcggtgaaggtctcctgcaaggcttctggaggcaccttcagcagctatgctatcagctgggtgcgacaggcccctggacaagggcttgagtggatgggagggatcatccctatctttggtacagcaaactacgcacagaagttccagggcagagtcacgattaccgcggacgaatccacgagcacagcctacatggagctgagcagcctgagatctgaggacacggccgtgtattactgtgcgagaggacgtggatacagctatggtcacgactactggggccagggaaccctggtcaccgtgtcctca

SEQ ID NO: 1104 - protein, 119 aa, Artificial Sequence
  YU505-E04 VH PRT
QVQLVQSGAEVKKPGSSVKVSCKASGGTFSSYAISWVRQAPGQGLEWMGGIIPIFGTANYAQKFQGRVTITADESTSTAYMELSSLRSEDTAVYYCARGRGYSYGHDYWGQGTLVTVSS

SEQ ID NO: 1105 - DNA, 1341 bp, Artificial Sequence
  YU505-E04 VH complete DNA
caggttcagctggtgcagtctggggctgaggtgaagaagcctgggtcctcggtgaaggtctcctgcaaggcttctggaggcaccttcagcagctatgctatcagctgggtgcgacaggcccctggacaagggcttgagtggatgggagggatcatccctatctttggtacagcaaactacgcacagaagttccagggcagagtcacgattaccgcggacgaatccacgagcacagcctacatggagctgagcagcctgagatctgaggacacggccgtgtattactgtgcgagaggacgtggatacagctatggtcacgactactggggccagggaaccctggtcaccgtgtcctcagctagcaccaagggcccatcggtcttccccctggcaccctcctccaagagcacctctgggggcacagcggccctgggctgcctggtcaaggactacttccccgaaccggtgacggtgtcgtggaactcaggcgccctgaccagcggcgtgcacaccttcccggctgtcctacagtcctcaggactctactccctcagcagcgtggtgaccgtgccctccagcagcttgggcacccagacctacatctgcaacgtgaatcacaagcccagcaacaccaaggtggacaagaaagttgagcccaaatcttgtgacaaaactcacacatgcccaccgtgcccagcacctccagtggccggaccgtcagtcttcctcttccccccaaaacccaaggacaccctcatgatctcccggacccctgaggtcacatgcgtggtggtgggcgtgagccacgaagaccctgaggtcaagttcaactggtacgtggacggcgtggaggtgcataatgccaagacaaagccgcgggaggagcagtacaacagcacgtaccgggtggtcagcgtcctcaccgtcctgcaccaggactggctgaatggcaaggagtacaagtgcaaggtctccaacaaacagctcccatcccccatcgagaaaaccatctccaaagccaaagggcagccccgagaaccacaggtgtacaccctgcccccatcccgggatgagctgaccaagaaccaggtcagcctgacctgcctggtcaaaggcttctatcccagcgacatcgccgtggagtgggagagcaatgggcagccggagaacaactacaagaccacgcctcccgtgctggactccgacggctccttcttcctctacagcaagctcaccgtggacaagagcaggtggcagcaggggaacgtcttctcatgctccgtgatgcatgaggctctgcacaaccactacacgcagaaaagcctctccctgtccccgggt

SEQ ID NO: 1106 - protein, 447 aa, Artificial Sequence
  YU505-E04 VH complete PRT
QVQLVQSGAEVKKPGSSVKVSCKASGGTFSSYAISWVRQAPGQGLEWMGGIIPIFGTANYAQKFQGRVTITADESTSTAYMELSSLRSEDTAVYYCARGRGYSYGHDYWGQGTLVTVSSASTKGPSVFPLAPSSKSTSGGTAALGCLVKDYFPEPVTVSWNSGALTSGVHTFPAVLQSSGLYSLSSVVTVPSSSLGTQTYICNVNHKPSNTKVDKKVEPKSCDKTHTCPPCPAPPVAGPSVFLFPPKPKDTLMISRTPEVTCVVVGVSHEDPEVKFNWYVDGVEVHNAKTKPREEQYNSTYRVVSVLTVLHQDWLNGKEYKCKVSNKQLPSPIEKTISKAKGQPREPQVYTLPPSRDELTKNQVSLTCLVKGFYPSDIAVEWESNGQPENNYKTTPPVLDSDGSFFLYSKLTVDKSRWQQGNVFSCSVMHEALHNHYTQKSLSLSPG

SEQ ID NO: 1107 - DNA, 648 bp, Artificial Sequence
  YU505-E04 VL complete DNA
tcctatgagctgactcagccaccctcggtgtctgaagcccccaggcagagggtcaccatctcctgttctggaagcagctccaacatcggaaataatgctgtaaactggtaccagcagttcccaggaaaggctcccaaactcctcatctattatgatgatctgctgccctcaggggtctctgaccgattctctggctccaagtctggcacctcagcctccctggccatcagtgggctccagtctgaggatgaggctgattattactgtgcagcctgggatgacagcctgaatggttgggtgttcggcggagggaccaagctgaccgtcctaggtcagcccaaggctgcaccaagtgtcactctgttcccgccctcctctgaggagcttcaagccaacaaggccacactggtgtgtctcataagtgacttctacccgggagccgtgacagtggcctggaaggcagatagcagccccgtcaaggcgggagtggagaccaccacaccctccaaacaaagcaacaacaagtacgcggccagcagctatctgagcctgacgcctgagcagtggaagtcccacagaagctacagctgccaggtcacgcatgaagggagcaccgtggagaagacagtggcccctacagaatgttca

SEQ ID NO: 1108 - protein, 216 aa, Artificial Sequence
  YU505-E04 VL complete PRT
SYELTQPPSVSEAPRQRVTISCSGSSSNIGNNAVNWYQQFPGKAPKLLIYYDDLLPSGVSDRFSGSKSGTSASLAISGLQSEDEADYYCAAWDDSLNGWVFGGGTKLTVLGQPKAAPSVTLFPPSSEELQANKATLVCLISDFYPGAVTVAWKADSSPVKAGVETTTPSKQSNNKYAASSYLSLTPEQWKSHRSYSCQVTHEGSTVEKTVAPTECS

SEQ ID NO: 1109 - DNA, 15 bp, Artificial Sequence
  YU505-F03 HCDR1 DNA
ggctactatatgcac

SEQ ID NO: 1110 - protein, 5 aa, Artificial Sequence
  YU505-F03 HCDR1 PRT
GYYMH

SEQ ID NO: 1111 - DNA, 51 bp, Artificial Sequence
  YU505-F03 HCDR2 DNA
cagatcaaccctaacagtggtggcacaaactatgcacagaagtttcagggc

SEQ ID NO: 1112 - protein, 16 aa, Artificial Sequence
  YU505-F03 HCDR2 PRT
QINPNSGGTNYAQKFQ

SEQ ID NO: 1113 - DNA, 18 bp, Artificial Sequence
  YU505-F03 HCDR3 DNA
ggggaaggctttgactac

SEQ ID NO: 1114 - protein, 6 aa, Artificial Sequence
  YU505-F03 HCDR3 PRT
GEGFDY

SEQ ID NO: 1115 - DNA, 39 bp, Artificial Sequence; identical to SEQ ID NO: 1015
  YU505-F03 LCDR1 DNA

SEQ ID NO: 1116 - protein, 13 aa, Artificial Sequence
  YU505-F03 LCDR1 PRT
SGSSSNIGSNYVY

SEQ ID NO: 1117 - DNA, 21 bp, Artificial Sequence
  YU505-F03 LCDR2 DNA
aggaataatcagcggccctca

SEQ ID NO: 1118 - protein, 7 aa, Artificial Sequence
  YU505-F03 LCDR2 PRT
RNNQRPS

SEQ ID NO: 1119 - DNA, 33 bp, Artificial Sequence
  YU505-F03 LCDR3 DNA
gcagcatgggatgacagcctgagtggtgtggta

SEQ ID NO: 1120 - protein, 11 aa, Artificial Sequence
  YU505-F03 LCDR3 PRT
AAWDDSLSGVV

SEQ ID NO: 1121 - DNA, 330 bp, Artificial Sequence
  YU505-F03 VL DNA
tcctatgtgctgactcagccaccctcagcgtctgggacccccgggcagagggtcaccatctcttgttctggaagcagctccaacatcggaagtaattatgtatactggtaccagcagctcccaggaacggcccccaaactcctcatctataggaataatcagcggccctcaggggtccctgaccgattctctggctccaagtctggcacctcagcctccctggccatcagtgggctccggtccgagggtgaggctgattattactgtgcagcatgggatgacagcctgagtggtgtggtattcggcggagggaccaaggtcaccgtccta

SEQ ID NO: 1122 - protein, 110 aa, Artificial Sequence
  YU505-F03 VL PRT
SYVLTQPPSASGTPGQRVTISCSGSSSNIGSNYVYWYQQLPGTAPKLLIYRNNQRPSGVPDRFSGSKSGTSASLAISGLRSEGEADYYCAAWDDSLSGVVFGGGTKVTVL

SEQ ID NO: 1123 - DNA, 345 bp, Artificial Sequence
  YU505-F03 VH DNA
gaggtgcagctgttggagtctggggctgaggtgaagaagcctggggcctcagtgaaggtctcctgcaaggcttctggatacaccttcaccggctactatatgcactgggtgcgacaggcccctggacaagggcttgagtggatgggacagatcaaccctaacagtggtggcacaaactatgcacagaagtttcagggcagggtcaccatgaccagggacacgtccatcagcacagcctacatggagctgagcaggctgagatctgacgacacggccgtgtattactgtgcgaggggggaaggctttgactactggggccagggaaccctggtcaccgtgtcctca

SEQ ID NO: 1124 - protein, 115 aa, Artificial Sequence
  YU505-F03 VH PRT
EVQLLESGAEVKKPGASVKVSCKASGYTFTGYYMHWVRQAPGQGLEWMGQINPNSGGTNYAQKFQGRVTMTRDTSISTAYMELSRLRSDDTAVYYCARGEGFDYWGQGTLVTVSS

SEQ ID NO: 1125 - DNA, 1329 bp, Artificial Sequence
  YU505-F03 VH complete DNA
gaggtgcagctgttggagtctggggctgaggtgaagaagcctggggcctcagtgaaggtctcctgcaaggcttctggatacaccttcaccggctactatatgcactgggtgcgacaggcccctggacaagggcttgagtggatgggacagatcaaccctaacagtggtggcacaaactatgcacagaagtttcagggcagggtcaccatgaccagggacacgtccatcagcacagcctacatggagctgagcaggctgagatctgacgacacggccgtgtattactgtgcgaggggggaaggctttgactactggggccagggaaccctggtcaccgtgtcctcagctagcaccaagggcccatcggtcttccccctggcaccctcctccaagagcacctctgggggcacagcggccctgggctgcctggtcaaggactacttccccgaaccggtgacggtgtcgtggaactcaggcgccctgaccagcggcgtgcacaccttcccggctgtcctacagtcctcaggactctactccctcagcagcgtggtgaccgtgccctccagcagcttgggcacccagacctacatctgcaacgtgaatcacaagcccagcaacaccaaggtggacaagaaagttgagcccaaatcttgtgacaaaactcacacatgcccaccgtgcccagcacctccagtggccggaccgtcagtcttcctcttccccccaaaacccaaggacaccctcatgatctcccggacccctgaggtcacatgcgtggtggtgggcgtgagccacgaagaccctgaggtcaagttcaactggtacgtggacggcgtggaggtgcataatgccaagacaaagccgcgggaggagcagtacaacagcacgtaccgggtggtcagcgtcctcaccgtcctgcaccaggactggctgaatggcaaggagtacaagtgcaaggtctccaacaaacagctcccatcccccatcgagaaaaccatctccaaagccaaagggcagccccgagaaccacaggtgtacaccctgcccccatcccgggatgagctgaccaagaaccaggtcagcctgacctgcctggtcaaaggcttctatcccagcgacatcgccgtggagtgggagagcaatgggcagccggagaacaactacaagaccacgcctcccgtgctggactccgacggctccttcttcctctacagcaagctcaccgtggacaagagcaggtggcagcaggggaacgtcttctcatgctccgtgatgcatgaggctctgcacaaccactacacgcagaaaagcctctccctgtccccgggt

SEQ ID NO: 1126 - protein, 443 aa, Artificial Sequence
  YU505-F03 VH complete PRT
EVQLLESGAEVKKPGASVKVSCKASGYTFTGYYMHWVRQAPGQGLEWMGQINPNSGGTNYAQKFQGRVTMTRDTSISTAYMELSRLRSDDTAVYYCARGEGFDYWGQGTLVTVSSASTKGPSVFPLAPSSKSTSGGTAALGCLVKDYFPEPVTVSWNSGALTSGVHTFPAVLQSSGLYSLSSVVTVPSSSLGTQTYICNVNHKPSNTKVDKKVEPKSCDKTHTCPPCPAPPVAGPSVFLFPPKPKDTLMISRTPEVTCVVVGVSHEDPEVKFNWYVDGVEVHNAKTKPREEQYNSTYRVVSVLTVLHQDWLNGKEYKCKVSNKQLPSPIEKTISKAKGQPREPQVYTLPPSRDELTKNQVSLTCLVKGFYPSDIAVEWESNGQPENNYKTTPPVLDSDGSFFLYSKLTVDKSRWQQGNVFSCSVMHEALHNHYTQKSLSLSPG

SEQ ID NO: 1127 - DNA, 648 bp, Artificial Sequence
  YU505-F03 VL complete DNA
tcctatgtgctgactcagccaccctcagcgtctgggacccccgggcagagggtcaccatctcttgttctggaagcagctccaacatcggaagtaattatgtatactggtaccagcagctcccaggaacggcccccaaactcctcatctataggaataatcagcggccctcaggggtccctgaccgattctctggctccaagtctggcacctcagcctccctggccatcagtgggctccggtccgagggtgaggctgattattactgtgcagcatgggatgacagcctgagtggtgtggtattcggcggagggaccaaggtcaccgtcctaggtcagcccaaggctgcaccaagtgtcactctgttcccgccctcctctgaggagcttcaagccaacaaggccacactggtgtgtctcataagtgacttctacccgggagccgtgacagtggcctggaaggcagatagcagccccgtcaaggcgggagtggagaccaccacaccctccaaacaaagcaacaacaagtacgcggccagcagctatctgagcctgacgcctgagcagtggaagtcccacagaagctacagctgccaggtcacgcatgaagggagcaccgtggagaagacagtggcccctacagaatgttca

SEQ ID NO: 1128 - protein, 216 aa, Artificial Sequence
  YU505-F03 VL complete PRT
SYVLTQPPSASGTPGQRVTISCSGSSSNIGSNYVYWYQQLPGTAPKLLIYRNNQRPSGVPDRFSGSKSGTSASLAISGLRSEGEADYYCAAWDDSLSGVVFGGGTKVTVLGQPKAAPSVTLFPPSSEELQANKATLVCLISDFYPGAVTVAWKADSSPVKAGVETTTPSKQSNNKYAASSYLSLTPEQWKSHRSYSCQVTHEGSTVEKTVAPTECS

SEQ ID NO: 1129 - DNA, 15 bp, Artificial Sequence
  YU505-F04 HCDR1 DNA
agctatgctatcagc

SEQ ID NO: 1130 - protein, 5 aa, Artificial Sequence
  YU505-F04 HCDR1 PRT
SYAIS

SEQ ID NO: 1131 - DNA, 51 bp, Artificial Sequence; identical to SEQ ID NO: 911
  YU505-F04 HCDR2 DNA

SEQ ID NO: 1132 - protein, 16 aa, Artificial Sequence
  YU505-F04 HCDR2 PRT
GIIPIFGTANYAQKFQ

SEQ ID NO: 1133 - DNA, 21 bp, Artificial Sequence
  YU505-F04 HCDR3 DNA
ggagctggggaaattgactac

SEQ ID NO: 1134 - protein, 7 aa, Artificial Sequence
  YU505-F04 HCDR3 PRT
GAGEIDY

SEQ ID NO: 1135 - DNA, 42 bp, Artificial Sequence
  YU505-F04 LCDR1 DNA
actgggagcagctccaacatcggggcaggttatgatgtacag

SEQ ID NO: 1136 - protein, 14 aa, Artificial Sequence
  YU505-F04 LCDR1 PRT
TGSSSNIGAGYDVQ

SEQ ID NO: 1137 - DNA, 21 bp, Artificial Sequence
  YU505-F04 LCDR2 DNA
gctaacacctatcggccctca

SEQ ID NO: 1138 - protein, 7 aa, Artificial Sequence
  YU505-F04 LCDR2 PRT
ANTYRPS

SEQ ID NO: 1139 - DNA, 33 bp, Artificial Sequence
  YU505-F04 LCDR3 DNA
tcaacacgagatgacaacctggatggtgtgata

SEQ ID NO: 1140 - protein, 11 aa, Artificial Sequence
  YU505-F04 LCDR3 PRT
STRDDNLDGVI

SEQ ID NO: 1141 - DNA, 333 bp, Artificial Sequence
  YU505-F04 VL DNA
cagtctgtgctgacgcagccgccctcagtgtctggggccccagggcagagggtcaccatctcctgcactgggagcagctccaacatcggggcaggttatgatgtacagtggtaccaacaacttccaggaacagcccccaaactcctcatctatgctaacacctatcggccctcaggggtccctgaccgattctctgcctccaagtctggcacctcagcctccctggccatcagtgggctccactctgaggatgaggctgattattattgttcaacacgagatgacaacctggatggtgtgatattcggcggagggaccaagttgaccgtccta

SEQ ID NO: 1142 - protein, 111 aa, Artificial Sequence
  YU505-F04 VL PRT
QSVLTQPPSVSGAPGQRVTISCTGSSSNIGAGYDVQWYQQLPGTAPKLLIYANTYRPSGVPDRFSASKSGTSASLAISGLHSEDEADYYCSTRDDNLDGVIFGGGTKLTVL

SEQ ID NO: 1143 - DNA, 348 bp, Artificial Sequence
  YU505-F04 VH DNA
caggttcagctggtgcagtctggggctgaggtgaagaagcctgggtcctcggtgaaggtctcctgcaaggcttctggaggcaccttcagcagctatgctatcagctgggtgcgacaggcccctggacaagggcttgagtggatgggagggatcatccctatctttggtacagcaaactacgcacagaagttccagggcagagtcacgattaccgcggacgaatccacgagcacagcctacatggagctgagcagcctgagatctgaggacacggccgtgtattactgcgcgagaggagctggggaaattgactactggggccagggaaccctggtcaccgtgtcctca

SEQ ID NO: 1144 - protein, 116 aa, Artificial Sequence
  YU505-F04 VH PRT
QVQLVQSGAEVKKPGSSVKVSCKASGGTFSSYAISWVRQAPGQGLEWMGGIIPIFGTANYAQKFQGRVTITADESTSTAYMELSSLRSEDTAVYYCARGAGEIDYWGQGTLVTVSS

SEQ ID NO: 1145 - DNA, 1332 bp, Artificial Sequence
  YU505-F04 VH complete DNA
caggttcagctggtgcagtctggggctgaggtgaagaagcctgggtcctcggtgaaggtctcctgcaaggcttctggaggcaccttcagcagctatgctatcagctgggtgcgacaggcccctggacaagggcttgagtggatgggagggatcatccctatctttggtacagcaaactacgcacagaagttccagggcagagtcacgattaccgcggacgaatccacgagcacagcctacatggagctgagcagcctgagatctgaggacacggccgtgtattactgcgcgagaggagctggggaaattgactactggggccagggaaccctggtcaccgtgtcctcagctagcaccaagggcccatcggtcttccccctggcaccctcctccaagagcacctctgggggcacagcggccctgggctgcctggtcaaggactacttccccgaaccggtgacggtgtcgtggaactcaggcgccctgaccagcggcgtgcacaccttcccggctgtcctacagtcctcaggactctactccctcagcagcgtggtgaccgtgccctccagcagcttgggcacccagacctacatctgcaacgtgaatcacaagcccagcaacaccaaggtggacaagaaagttgagcccaaatcttgtgacaaaactcacacatgcccaccgtgcccagcacctccagtggccggaccgtcagtcttcctcttccccccaaaacccaaggacaccctcatgatctcccggacccctgaggtcacatgcgtggtggtgggcgtgagccacgaagaccctgaggtcaagttcaactggtacgtggacggcgtggaggtgcataatgccaagacaaagccgcgggaggagcagtacaacagcacgtaccgggtggtcagcgtcctcaccgtcctgcaccaggactggctgaatggcaaggagtacaagtgcaaggtctccaacaaacagctcccatcccccatcgagaaaaccatctccaaagccaaagggcagccccgagaaccacaggtgtacaccctgcccccatcccgggatgagctgaccaagaaccaggtcagcctgacctgcctggtcaaaggcttctatcccagcgacatcgccgtggagtgggagagcaatgggcagccggagaacaactacaagaccacgcctcccgtgctggactccgacggctccttcttcctctacagcaagctcaccgtggacaagagcaggtggcagcaggggaacgtcttctcatgctccgtgatgcatgaggctctgcacaaccactacacgcagaaaagcctctccctgtccccgggt

SEQ ID NO: 1146 - protein, 444 aa, Artificial Sequence
  YU505-F04 VH complete PRT
QVQLVQSGAEVKKPGSSVKVSCKASGGTFSSYAISWVRQAPGQGLEWMGGIIPIFGTANYAQKFQGRVTITADESTSTAYMELSSLRSEDTAVYYCARGAGEIDYWGQGTLVTVSSASTKGPSVFPLAPSSKSTSGGTAALGCLVKDYFPEPVTVSWNSGALTSGVHTFPAVLQSSGLYSLSSVVTVPSSSLGTQTYICNVNHKPSNTKVDKKVEPKSCDKTHTCPPCPAPPVAGPSVFLFPPKPKDTLMISRTPEVTCVVVGVSHEDPEVKFNWYVDGVEVHNAKTKPREEQYNSTYRVVSVLTVLHQDWLNGKEYKCKVSNKQLPSPIEKTISKAKGQPREPQVYTLPPSRDELTKNQVSLTCLVKGFYPSDIAVEWESNGQPENNYKTTPPVLDSDGSFFLYSKLTVDKSRWQQGNVFSCSVMHEALHNHYTQKSLSLSPG

SEQ ID NO: 1147 - DNA, 651 bp, Artificial Sequence
  YU505-F04 VL complete DNA
cagtctgtgctgacgcagccgccctcagtgtctggggccccagggcagagggtcaccatctcctgcactgggagcagctccaacatcggggcaggttatgatgtacagtggtaccaacaacttccaggaacagcccccaaactcctcatctatgctaacacctatcggccctcaggggtccctgaccgattctctgcctccaagtctggcacctcagcctccctggccatcagtgggctccactctgaggatgaggctgattattattgttcaacacgagatgacaacctggatggtgtgatattcggcggagggaccaagttgaccgtcctaggtcagcccaaggctgcaccaagtgtcactctgttcccgccctcctctgaggagcttcaagccaacaaggccacactggtgtgtctcataagtgacttctacccgggagccgtgacagtggcctggaaggcagatagcagccccgtcaaggcgggagtggagaccaccacaccctccaaacaaagcaacaacaagtacgcggccagcagctatctgagcctgacgcctgagcagtggaagtcccacagaagctacagctgccaggtcacgcatgaagggagcaccgtggagaagacagtggcccctacagaatgttca

SEQ ID NO: 1148 - protein, 217 aa, Artificial Sequence
  YU505-F04 VL complete PRT
QSVLTQPPSVSGAPGQRVTISCTGSSSNIGAGYDVQWYQQLPGTAPKLLIYANTYRPSGVPDRFSASKSGTSASLAISGLHSEDEADYYCSTRDDNLDGVIFGGGTKLTVLGQPKAAPSVTLFPPSSEELQANKATLVCLISDFYPGAVTVAWKADSSPVKAGVETTTPSKQSNNKYAASSYLSLTPEQWKSHRSYSCQVTHEGSTVEKTVAPTECS

SEQ ID NO: 1149 - DNA, 15 bp, Artificial Sequence
  YU505-F05 HCDR1 DNA
agctatggcatgcac

SEQ ID NO: 1150 - protein, 5 aa, Artificial Sequence
  YU505-F05 HCDR1 PRT
SYGMH

SEQ ID NO: 1151 - DNA, 51 bp, Artificial Sequence
  YU505-F05 HCDR2 DNA
gttatgtcatatgatggaagtaaaaaatactatgcagactccgtgaagggc

SEQ ID NO: 1152 - protein, 16 aa, Artificial Sequence
  YU505-F05 HCDR2 PRT
VMSYDGSKKYYADSVK

SEQ ID NO: 1153 - DNA, 15 bp, Artificial Sequence
  YU505-F05 HCDR3 DNA
cagggtatggacgtc

SEQ ID NO: 1154 - protein, 5 aa, Artificial Sequence
  YU505-F05 HCDR3 PRT
QGMDV

SEQ ID NO: 1155 - DNA, 33 bp, Artificial Sequence; identical to SEQ ID NO: 775
  YU505-F05 LCDR1 DNA

SEQ ID NO: 1156 - protein, 11 aa, Artificial Sequence
  YU505-F05 LCDR1 PRT
GGNNIGSKSVH

SEQ ID NO: 1157 - DNA, 21 bp, Artificial Sequence
  YU505-F05 LCDR2 DNA
tatattagcgaccggccctca

SEQ ID NO: 1158 - protein, 7 aa, Artificial Sequence
  YU505-F05 LCDR2 PRT
YISDRPS

SEQ ID NO: 1159 - DNA, 33 bp, Artificial Sequence
  YU505-F05 LCDR3 DNA
cacgtgtgggatagtagtagtgatcatgtggta

SEQ ID NO: 1160 - protein, 11 aa, Artificial Sequence
  YU505-F05 LCDR3 PRT
HVWDSSSDHVV

SEQ ID NO: 1161 - DNA, 324 bp, Artificial Sequence
  YU505-F05 VL DNA
cagtctgtgctgactcagccaccctcagtgtcagtggccccaggaaagacggccaggattacctgtgggggaaacaacattggaagtaaaagtgtgcactggtaccagcagaagccaggccaggcccctgtgttggtcatctattatattagcgaccggccctcagggatccctgagcgattctctggctccaactctgggaacacggccaccctgaccatcagcagggtcgaggccggggatgaggccgcctattactgtcacgtgtgggatagtagtagtgatcatgtggtattcggcggagggaccaagctgaccgtccta

SEQ ID NO: 1162 - protein, 108 aa, Artificial Sequence
  YU505-F05 VL PRT
QSVLTQPPSVSVAPGKTARITCGGNNIGSKSVHWYQQKPGQAPVLVIYYISDRPSGIPERFSGSNSGNTATLTISRVEAGDEAAYYCHVWDSSSDHVVFGGGTKLTVL

SEQ ID NO: 1163 - DNA, 342 bp, Artificial Sequence
  YU505-F05 VH DNA
gaggtgcagctgttggagtctgggggaggcgtggtccagcctgggaggtccctgagactctcctgtgcagcctctggattcaccttcagtagctatggcatgcactgggtccgccaggctccaggcaaggggctggagtgggtggcagttatgtcatatgatggaagtaaaaaatactatgcagactccgtgaagggccgattcaccatctccagagacaattccaagaacacgctgtatctgcaaatgaacagcctgagagctgaggacacggctgtgtattactgtgtcactcagggtatggacgtctggggccaagggaccctggtcaccgtgtcctca

SEQ ID NO: 1164 - protein, 114 aa, Artificial Sequence
  YU505-F05 VH PRT
EVQLLESGGGVVQPGRSLRLSCAASGFTFSSYGMHWVRQAPGKGLEWVAVMSYDGSKKYYADSVKGRFTISRDNSKNTLYLQMNSLRAEDTAVYYCVTQGMDVWGQGTLVTVSS

SEQ ID NO: 1165 - DNA, 1326 bp, Artificial Sequence
  YU505-F05 VH complete DNA
gaggtgcagctgttggagtctgggggaggcgtggtccagcctgggaggtccctgagactctcctgtgcagcctctggattcaccttcagtagctatggcatgcactgggtccgccaggctccaggcaaggggctggagtgggtggcagttatgtcatatgatggaagtaaaaaatactatgcagactccgtgaagggccgattcaccatctccagagacaattccaagaacacgctgtatctgcaaatgaacagcctgagagctgaggacacggctgtgtattactgtgtcactcagggtatggacgtctggggccaagggaccctggtcaccgtgtcctcagctagcaccaagggcccatcggtcttccccctggcaccctcctccaagagcacctctgggggcacagcggccctgggctgcctggtcaaggactacttccccgaaccggtgacggtgtcgtggaactcaggcgccctgaccagcggcgtgcacaccttcccggctgtcctacagtcctcaggactctactccctcagcagcgtggtgaccgtgccctccagcagcttgggcacccagacctacatctgcaacgtgaatcacaagcccagcaacaccaaggtggacaagaaagttgagcccaaatcttgtgacaaaactcacacatgcccaccgtgcccagcacctccagtggccggaccgtcagtcttcctcttccccccaaaacccaaggacaccctcatgatctcccggacccctgaggtcacatgcgtggtggtgggcgtgagccacgaagaccctgaggtcaagttcaactggtacgtggacggcgtggaggtgcataatgccaagacaaagccgcgggaggagcagtacaacagcacgtaccgggtggtcagcgtcctcaccgtcctgcaccaggactggctgaatggcaaggagtacaagtgcaaggtctccaacaaacagctcccatcccccatcgagaaaaccatctccaaagccaaagggcagccccgagaaccacaggtgtacaccctgcccccatcccgggatgagctgaccaagaaccaggtcagcctgacctgcctggtcaaaggcttctatcccagcgacatcgccgtggagtgggagagcaatgggcagccggagaacaactacaagaccacgcctcccgtgctggactccgacggctccttcttcctctacagcaagctcaccgtggacaagagcaggtggcagcaggggaacgtcttctcatgctccgtgatgcatgaggctctgcacaaccactacacgcagaaaagcctctccctgtccccgggt

SEQ ID NO: 1166 - protein, 442 aa, Artificial Sequence
  YU505-F05 VH complete PRT
EVQLLESGGGVVQPGRSLRLSCAASGFTFSSYGMHWVRQAPGKGLEWVAVMSYDGSKKYYADSVKGRFTISRDNSKNTLYLQMNSLRAEDTAVYYCVTQGMDVWGQGTLVTVSSASTKGPSVFPLAPSSKSTSGGTAALGCLVKDYFPEPVTVSWNSGALTSGVHTFPAVLQSSGLYSLSSVVTVPSSSLGTQTYICNVNHKPSNTKVDKKVEPKSCDKTHTCPPCPAPPVAGPSVFLFPPKPKDTLMISRTPEVTCVVVGVSHEDPEVKFNWYVDGVEVHNAKTKPREEQYNSTYRVVSVLTVLHQDWLNGKEYKCKVSNKQLPSPIEKTISKAKGQPREPQVYTLPPSRDELTKNQVSLTCLVKGFYPSDIAVEWESNGQPENNYKTTPPVLDSDGSFFLYSKLTVDKSRWQQGNVFSCSVMHEALHNHYTQKSLSLSPG

SEQ ID NO: 1167 - DNA, 642 bp, Artificial Sequence
  YU505-F05 VL complete DNA
cagtctgtgctgactcagccaccctcagtgtcagtggccccaggaaagacggccaggattacctgtgggggaaacaacattggaagtaaaagtgtgcactggtaccagcagaagccaggccaggcccctgtgttggtcatctattatattagcgaccggccctcagggatccctgagcgattctctggctccaactctgggaacacggccaccctgaccatcagcagggtcgaggccggggatgaggccgcctattactgtcacgtgtgggatagtagtagtgatcatgtggtattcggcggagggaccaagctgaccgtcctaggtcagcccaaggctgcaccaagtgtcactctgttcccgccctcctctgaggagcttcaagccaacaaggccacactggtgtgtctcataagtgacttctacccgggagccgtgacagtggcctggaaggcagatagcagccccgtcaaggcgggagtggagaccaccacaccctccaaacaaagcaacaacaagtacgcggccagcagctatctgagcctgacgcctgagcagtggaagtcccacagaagctacagctgccaggtcacgcatgaagggagcaccgtggagaagacagtggcccctacagaatgttca

SEQ ID NO: 1168 - protein, 214 aa, Artificial Sequence
  YU505-F05 VL complete PRT
QSVLTQPPSVSVAPGKTARITCGGNNIGSKSVHWYQQKPGQAPVLVIYYISDRPSGIPERFSGSNSGNTATLTISRVEAGDEAAYYCHVWDSSSDHVVFGGGTKLTVLGQPKAAPSVTLFPPSSEELQANKATLVCLISDFYPGAVTVAWKADSSPVKAGVETTTPSKQSNNKYAASSYLSLTPEQWKSHRSYSCQVTHEGSTVEKTVAPTECS

SEQ ID NO: 1169 - DNA, 15 bp, Artificial Sequence
  YU519-A01 HCDR1 DNA
agctatgccatgagc

SEQ ID NO: 1170 - protein, 5 aa, Artificial Sequence
  YU519-A01 HCDR1 PRT
SYAMS

SEQ ID NO: 1171 - DNA, 51 bp, Artificial Sequence; identical to SEQ ID NO: 131
  YU519-A01 HCDR2 DNA

SEQ ID NO: 1172 - protein, 16 aa, Artificial Sequence
  YU519-A01 HCDR2 PRT
AISGSGGSTYYADSVK

SEQ ID NO: 1173 - DNA, 42 bp, Artificial Sequence
  YU519-A01 HCDR3 DNA
gatcgatttttggagtggttattcacgggaccatttgactac

SEQ ID NO: 1174 - protein, 14 aa, Artificial Sequence
  YU519-A01 HCDR3 PRT
DRFLEWLFTGPFDY

SEQ ID NO: 1175 - DNA, 33 bp, Artificial Sequence
  YU519-A01 LCDR1 DNA
caggcgagtcaggacattagcaactatttaaat

SEQ ID NO: 1176 - protein, 11 aa, Artificial Sequence
  YU519-A01 LCDR1 PRT
QASQDISNYLN

SEQ ID NO: 1177 - DNA, 21 bp, Artificial Sequence
  YU519-A01 LCDR2 DNA
gatgcatccaatttggaaaca

SEQ ID NO: 1178 - protein, 7 aa, Artificial Sequence
  YU519-A01 LCDR2 PRT
DASNLET

SEQ ID NO: 1179 - DNA, 27 bp, Artificial Sequence
  YU519-A01 LCDR3 DNA
caccagtatgataatttcccctacact

SEQ ID NO: 1180 - protein, 9 aa, Artificial Sequence
  YU519-A01 LCDR3 PRT
HQYDNFPYT

SEQ ID NO: 1181 - DNA, 321 bp, Artificial Sequence
  YU519-A01 VL DNA
gacatcgtgatgacccagtctccatcctccctgtctgcatctgtaggagacagagtcaccatcacttgccaggcgagtcaggacattagcaactatttaaattggtatcagcagaaaccagggaaagcccctaagctcctgatctacgatgcatccaatttggaaacaggggtcccatcaaggttcagtggaagtggatctgggaaagatttcacttttatcatcaacaacctgcagcctgatgacattgcaacatattactgtcaccagtatgataatttcccctacacttttggccaggggaccaaagtggatatcaaa

SEQ ID NO: 1182 - protein, 107 aa, Artificial Sequence
  YU519-A01 VL PRT
DIVMTQSPSSLSASVGDRVTITCQASQDISNYLNWYQQKPGKAPKLLIYDASNLETGVPSRFSGSGSGKDFTFIINNLQPDDIATYYCHQYDNFPYTFGQGTKVDIK

SEQ ID NO: 1183 - DNA, 369 bp, Artificial Sequence
  YU519-A01 VH DNA
caggttcagctggtgcagtctgggggaggcttggtacagcctggggggtccctgagactctcctgtgcagcctctggattcacctttagcagctatgccatgagctgggtccgccaggctccagggaaggggctggagtgggtctcagctattagtggtagtggtggtagcacatactacgcagactccgtgaagggccggttcaccatctccagagacaattccaagaacacgctgtatctgcaaatgaacagcctgagagccgaggacacggccgtatattactgtgcgaaagatcgatttttggagtggttattcacgggaccatttgactactggggccagggaaccctggtcaccgtgtcctca

SEQ ID NO: 1184 - protein, 123 aa, Artificial Sequence
  YU519-A01 VH PRT
QVQLVQSGGGLVQPGGSLRLSCAASGFTFSSYAMSWVRQAPGKGLEWVSAISGSGGSTYYADSVKGRFTISRDNSKNTLYLQMNSLRAEDTAVYYCAKDRFLEWLFTGPFDYWGQGTLVTVSS

SEQ ID NO: 1185 - DNA, 1353 bp, Artificial Sequence
  YU519-A01 VH complete DNA
caggttcagctggtgcagtctgggggaggcttggtacagcctggggggtccctgagactctcctgtgcagcctctggattcacctttagcagctatgccatgagctgggtccgccaggctccagggaaggggctggagtgggtctcagctattagtggtagtggtggtagcacatactacgcagactccgtgaagggccggttcaccatctccagagacaattccaagaacacgctgtatctgcaaatgaacagcctgagagccgaggacacggccgtatattactgtgcgaaagatcgatttttggagtggttattcacgggaccatttgactactggggccagggaaccctggtcaccgtgtcctcagctagcaccaagggcccatcggtcttccccctggcaccctcctccaagagcacctctgggggcacagcggccctgggctgcctggtcaaggactacttccccgaaccggtgacggtgtcgtggaactcaggcgccctgaccagcggcgtgcacaccttcccggctgtcctacagtcctcaggactctactccctcagcagcgtggtgaccgtgccctccagcagcttgggcacccagacctacatctgcaacgtgaatcacaagcccagcaacaccaaggtggacaagaaagttgagcccaaatcttgtgacaaaactcacacatgcccaccgtgcccagcacctccagtggccggaccgtcagtcttcctcttccccccaaaacccaaggacaccctcatgatctcccggacccctgaggtcacatgcgtggtggtgggcgtgagccacgaagaccctgaggtcaagttcaactggtacgtggacggcgtggaggtgcataatgccaagacaaagccgcgggaggagcagtacaacagcacgtaccgggtggtcagcgtcctcaccgtcctgcaccaggactggctgaatggcaaggagtacaagtgcaaggtctccaacaaacagctcccatcccccatcgagaaaaccatctccaaagccaaagggcagccccgagaaccacaggtgtacaccctgcccccatcccgggatgagctgaccaagaaccaggtcagcctgacctgcctggtcaaaggcttctatcccagcgacatcgccgtggagtgggagagcaatgggcagccggagaacaactacaagaccacgcctcccgtgctggactccgacggctccttcttcctctacagcaagctcaccgtggacaagagcaggtggcagcaggggaacgtcttctcatgctccgtgatgcatgaggctctgcacaaccactacacgcagaaaagcctctccctgtccccgggt

SEQ ID NO: 1186 - protein, 451 aa, Artificial Sequence
  YU519-A01 VH complete PRT
QVQLVQSGGGLVQPGGSLRLSCAASGFTFSSYAMSWVRQAPGKGLEWVSAISGSGGSTYYADSVKGRFTISRDNSKNTLYLQMNSLRAEDTAVYYCAKDRFLEWLFTGPFDYWGQGTLVTVSSASTKGPSVFPLAPSSKSTSGGTAALGCLVKDYFPEPVTVSWNSGALTSGVHTFPAVLQSSGLYSLSSVVTVPSSSLGTQTYICNVNHKPSNTKVDKKVEPKSCDKTHTCPPCPAPPVAGPSVFLFPPKPKDTLMISRTPEVTCVVVGVSHEDPEVKFNWYVDGVEVHNAKTKPREEQYNSTYRVVSVLTVLHQDWLNGKEYKCKVSNKQLPSPIEKTISKAKGQPREPQVYTLPPSRDELTKNQVSLTCLVKGFYPSDIAVEWESNGQPENNYKTTPPVLDSDGSFFLYSKLTVDKSRWQQGNVFSCSVMHEALHNHYTQKSLSLSPG

SEQ ID NO: 1187 - DNA, 642 bp, Artificial Sequence
  YU519-A01 VL complete DNA
gacatcgtgatgacccagtctccatcctccctgtctgcatctgtaggagacagagtcaccatcacttgccaggcgagtcaggacattagcaactatttaaattggtatcagcagaaaccagggaaagcccctaagctcctgatctacgatgcatccaatttggaaacaggggtcccatcaaggttcagtggaagtggatctgggaaagatttcacttttatcatcaacaacctgcagcctgatgacattgcaacatattactgtcaccagtatgataatttcccctacacttttggccaggggaccaaagtggatatcaaacgtacggtggctgcaccatctgtgttcatcttcccgccatctgatgagcagttgaaatctggaactgcctctgttgtgtgcctgctgaataacttctatcccagagaggccaaagtacagtggaaggtggataacgccctccaatcgggtaactcccaggagagtgtcacagagcaggacagcaaggacagcacctacagcctcagcagcaccctgacgctgagcaaagcagactacgagaaacacaaagtctacgcctgcgaagtcacccatcagggcctgagctcgcccgtcacaaagagcttcaacaggggagagtgt

SEQ ID NO: 1188 - protein, 214 aa, Artificial Sequence
  YU519-A01 VL complete PRT
DIVMTQSPSSLSASVGDRVTITCQASQDISNYLNWYQQKPGKAPKLLIYDASNLETGVPSRFSGSGSGKDFTFIINNLQPDDIATYYCHQYDNFPYTFGQGTKVDIKRTVAAPSVFIFPPSDEQLKSGTASVVCLLNNFYPREAKVQWKVDNALQSGNSQESVTEQDSKDSTYSLSSTLTLSKADYEKHKVYACEVTHQGLSSPVTKSFNRGEC

SEQ ID NO: 1189 - DNA, 15 bp, Artificial Sequence
  YU519-A09 HCDR1 DNA
agctatgccatgagc

SEQ ID NO: 1190 - protein, 5 aa, Artificial Sequence
  YU519-A09 HCDR1 PRT
SYAMS

SEQ ID NO: 1191 - DNA, 51 bp, Artificial Sequence; identical to SEQ ID NO: 131
  YU519-A09 HCDR2 DNA

SEQ ID NO: 1192 - protein, 16 aa, Artificial Sequence
  YU519-A09 HCDR2 PRT
AISGSGGSTYYADSVK

SEQ ID NO: 1193 - DNA, 54 bp, Artificial Sequence
  YU519-A09 HCDR3 DNA
caccttggggacggtgactacgtcaattactactactactacggtatggacgtc

SEQ ID NO: 1194 - protein, 18 aa, Artificial Sequence
  YU519-A09 HCDR3 PRT
HLGDGDYVNYYYYYGMDV

SEQ ID NO: 1195 - DNA, 33 bp, Artificial Sequence
  YU519-A09 LCDR1 DNA
gggggaaacaacattggaagtaaaaatgtacac

SEQ ID NO: 1196 - protein, 11 aa, Artificial Sequence
  YU519-A09 LCDR1 PRT
GGNNIGSKNVH

SEQ ID NO: 1197 - DNA, 21 bp, Artificial Sequence
  YU519-A09 LCDR2 DNA
gatgataacgtccggccctca

SEQ ID NO: 1198 - protein, 7 aa, Artificial Sequence
  YU519-A09 LCDR2 PRT
DDNVRPS

SEQ ID NO: 1199 - DNA, 33 bp, Artificial Sequence
  YU519-A09 LCDR3 DNA
caggtgtggcttaatagtagtgatgatgtgcta

SEQ ID NO: 1200 - protein, 11 aa, Artificial Sequence
  YU519-A09 LCDR3 PRT
QVWLNSSDDVL

SEQ ID NO: 1201 - DNA, 324 bp, Artificial Sequence
  YU519-A09 VL DNA
tcctatgtgctgactcagccaccctcggtgtcagtggccccacgacagacggccaggattacctgtgggggaaacaacattggaagtaaaaatgtacactggtaccagcagaagccaggccaggcccctgtgctggtcgtctatgatgataacgtccggccctcagggatccctgagcgattctctggctccaactctgggaacacggccaccctgaccatcagcagggtcgaagccggggatgaggccgactattactgtcaggtgtggcttaatagtagtgatgatgtgctattcggcggaggcaccaaggtgaccgtcctc

SEQ ID NO: 1202 - protein, 108 aa, Artificial Sequence
  YU519-A09 VL PRT
SYVLTQPPSVSVAPRQTARITCGGNNIGSKNVHWYQQKPGQAPVLVVYDDNVRPSGIPERFSGSNSGNTATLTISRVEAGDEADYYCQVWLNSSDDVLFGGGTKVTVL

SEQ ID NO: 1203 - DNA, 381 bp, Artificial Sequence
  YU519-A09 VH DNA
caggtgcagctggtggagtctgggggaggcttggtacagcctggggggtccctgagactctcctgtgcagcctctggattcacctttggcagctatgccatgagctgggtccgccaggctccagggaaggggctggagtgggtctcagctattagtggtagtggtggtagcacatactacgcagactccgtgaagggccggttcaccatctccagagacaattccaagaacacgctgtatctgcaaatgaacagcctgagagccgaggacacggccgtatattactgtgcgaaacaccttggggacggtgactacgtcaattactactactactacggtatggacgtctggggccaagggaccctggtcaccgtgtcctca

SEQ ID NO: 1204 - protein, 127 aa, Artificial Sequence
  YU519-A09 VH PRT
QVQLVESGGGLVQPGGSLRLSCAASGFTFGSYAMSWVRQAPGKGLEWVSAISGSGGSTYYADSVKGRFTISRDNSKNTLYLQMNSLRAEDTAVYYCAKHLGDGDYVNYYYYYGMDVWGQGTLVTVSS

SEQ ID NO: 1205 - DNA, 1365 bp, Artificial Sequence
  YU519-A09 VH complete DNA
caggtgcagctggtggagtctgggggaggcttggtacagcctggggggtccctgagactctcctgtgcagcctctggattcacctttggcagctatgccatgagctgggtccgccaggctccagggaaggggctggagtgggtctcagctattagtggtagtggtggtagcacatactacgcagactccgtgaagggccggttcaccatctccagagacaattccaagaacacgctgtatctgcaaatgaacagcctgagagccgaggacacggccgtatattactgtgcgaaacaccttggggacggtgactacgtcaattactactactactacggtatggacgtctggggccaagggaccctggtcaccgtgtcctcagctagcaccaagggcccatcggtcttccccctggcaccctcctccaagagcacctctgggggcacagcggccctgggctgcctggtcaaggactacttccccgaaccggtgacggtgtcgtggaactcaggcgccctgaccagcggcgtgcacaccttcccggctgtcctacagtcctcaggactctactccctcagcagcgtggtgaccgtgccctccagcagcttgggcacccagacctacatctgcaacgtgaatcacaagcccagcaacaccaaggtggacaagaaagttgagcccaaatcttgtgacaaaactcacacatgcccaccgtgcccagcacctccagtggccggaccgtcagtcttcctcttccccccaaaacccaaggacaccctcatgatctcccggacccctgaggtcacatgcgtggtggtgggcgtgagccacgaagaccctgaggtcaagttcaactggtacgtggacggcgtggaggtgcataatgccaagacaaagccgcgggaggagcagtacaacagcacgtaccgggtggtcagcgtcctcaccgtcctgcaccaggactggctgaatggcaaggagtacaagtgcaaggtctccaacaaacagctcccatcccccatcgagaaaaccatctccaaagccaaagggcagccccgagaaccacaggtgtacaccctgcccccatcccgggatgagctgaccaagaaccaggtcagcctgacctgcctggtcaaaggcttctatcccagcgacatcgccgtggagtgggagagcaatgggcagccggagaacaactacaagaccacgcctcccgtgctggactccgacggctccttcttcctctacagcaagctcaccgtggacaagagcaggtggcagcaggggaacgtcttctcatgctccgtgatgcatgaggctctgcacaaccactacacgcagaaaagcctctccctgtccccgggt

SEQ ID NO: 1206 - protein, 455 aa, Artificial Sequence
  YU519-A09 VH complete PRT
QVQLVESGGGLVQPGGSLRLSCAASGFTFGSYAMSWVRQAPGKGLEWVSAISGSGGSTYYADSVKGRFTISRDNSKNTLYLQMNSLRAEDTAVYYCAKHLGDGDYVNYYYYYGMDVWGQGTLVTVSSASTKGPSVFPLAPSSKSTSGGTAALGCLVKDYFPEPVTVSWNSGALTSGVHTFPAVLQSSGLYSLSSVVTVPSSSLGTQTYICNVNHKPSNTKVDKKVEPKSCDKTHTCPPCPAPPVAGPSVFLFPPKPKDTLMISRTPEVTCVVVGVSHEDPEVKFNWYVDGVEVHNAKTKPREEQYNSTYRVVSVLTVLHQDWLNGKEYKCKVSNKQLPSPIEKTISKAKGQPREPQVYTLPPSRDELTKNQVSLTCLVKGFYPSDIAVEWESNGQPENNYKTTPPVLDSDGSFFLYSKLTVDKSRWQQGNVFSCSVMHEALHNHYTQKSLSLSPG

SEQ ID NO: 1207 - DNA, 642 bp, Artificial Sequence
  YU519-A09 VL complete DNA
tcctatgtgctgactcagccaccctcggtgtcagtggccccacgacagacggccaggattacctgtgggggaaacaacattggaagtaaaaatgtacactggtaccagcagaagccaggccaggcccctgtgctggtcgtctatgatgataacgtccggccctcagggatccctgagcgattctctggctccaactctgggaacacggccaccctgaccatcagcagggtcgaagccggggatgaggccgactattactgtcaggtgtggcttaatagtagtgatgatgtgctattcggcggaggcaccaaggtgaccgtcctcggtcagcccaaggctgcaccaagtgtcactctgttcccgccctcctctgaggagcttcaagccaacaaggccacactggtgtgtctcataagtgacttctacccgggagccgtgacagtggcctggaaggcagatagcagccccgtcaaggcgggagtggagaccaccacaccctccaaacaaagcaacaacaagtacgcggccagcagctatctgagcctgacgcctgagcagtggaagtcccacagaagctacagctgccaggtcacgcatgaagggagcaccgtggagaagacagtggcccctacagaatgttca

SEQ ID NO: 1208 - protein, 214 aa, Artificial Sequence
  YU519-A09 VL complete PRT
SYVLTQPPSVSVAPRQTARITCGGNNIGSKNVHWYQQKPGQAPVLVVYDDNVRPSGIPERFSGSNSGNTATLTISRVEAGDEADYYCQVWLNSSDDVLFGGGTKVTVLGQPKAAPSVTLFPPSSEELQANKATLVCLISDFYPGAVTVAWKADSSPVKAGVETTTPSKQSNNKYAASSYLSLTPEQWKSHRSYSCQVTHEGSTVEKTVAPTECS

SEQ ID NO: 1209 - DNA, 15 bp, Artificial Sequence
  YU519-B05 HCDR1 DNA
agctatgctatcagc

SEQ ID NO: 1210 - protein, 5 aa, Artificial Sequence
  YU519-B05 HCDR1 PRT
SYAIS

SEQ ID NO: 1211 - DNA, 51 bp, Artificial Sequence; identical to SEQ ID NO: 911
  YU519-B05 HCDR2 DNA

SEQ ID NO: 1212 - protein, 16 aa, Artificial Sequence
  YU519-B05 HCDR2 PRT
GIIPIFGTANYAQKFQ

SEQ ID NO: 1213 - DNA, 54 bp, Artificial Sequence
  YU519-B05 HCDR3 DNA
ccccgagtcccccgagtctgggagctctggatcgggtttggtgcttttgatatc

SEQ ID NO: 1214 - protein, 18 aa, Artificial Sequence
  YU519-B05 HCDR3 PRT
PRVPRVWELWIGFGAFDI

SEQ ID NO: 1215 - DNA, 36 bp, Artificial Sequence
  YU519-B05 LCDR1 DNA
agggccagtcagagtgttagcagcagctacttagcc

SEQ ID NO: 1216 - protein, 12 aa, Artificial Sequence
  YU519-B05 LCDR1 PRT
RASQSVSSSYLA

SEQ ID NO: 1217 - DNA, 21 bp, Artificial Sequence
  YU519-B05 LCDR2 DNA
ggtgcatccagcagggccact

SEQ ID NO: 1218 - protein, 7 aa, Artificial Sequence
  YU519-B05 LCDR2 PRT
GASSRAT

SEQ ID NO: 1219 - DNA, 27 bp, Artificial Sequence
  YU519-B05 LCDR3 DNA
cagcagtatggtagctcaccctacagt

SEQ ID NO: 1220 - protein, 9 aa, Artificial Sequence
  YU519-B05 LCDR3 PRT
QQYGSSPYS

SEQ ID NO: 1221 - DNA, 324 bp, Artificial Sequence
  YU519-B05 VL DNA
gaaatagtgatgacgcagtctccaggcaccctgtctttgtctccaggggaaagagccaccctctcctgcagggccagtcagagtgttagcagcagctacttagcctggtaccagcagaaacctggccaggctcccaggctcctcatctatggtgcatccagcagggccactggcatcccagacaggttcagtggcagtgggtctgggacagacttcactctcaccatcagcagactggagcctgaagattttgcagtgtattactgtcagcagtatggtagctcaccctacagttttggccaggggaccaagctggagatcaaa

SEQ ID NO: 1222 - protein, 108 aa, Artificial Sequence
  YU519-B05 VL PRT
EIVMTQSPGTLSLSPGERATLSCRASQSVSSSYLAWYQQKPGQAPRLLIYGASSRATGIPDRFSGSGSGTDFTLTISRLEPEDFAVYYCQQYGSSPYSFGQGTKLEIK

SEQ ID NO: 1223 - DNA, 381 bp, Artificial Sequence
  YU519-B05 VH DNA
caggttcagctggtgcagtctggggctgaggtgaagaagcctgggtcctcggtgaaggtctcctgcaaggcttctggaggcaccttcagcagctatgctatcagctgggtgcgacaggcccctggacaagggcttgagtggatgggagggatcatccctatctttggtacagcaaactacgcacagaagttccagggcagagtcacgattaccgcggacgaatccacgagcacagcctacatggagctgagcagcctgagatctgaggacacggccgtgtattactgtgcgaggccccgagtcccccgagtctgggagctctggatcgggtttggtgcttttgatatctggggccaagggacaatggtcaccgtgtcttca

SEQ ID NO: 1224 - protein, 127 aa, Artificial Sequence
  YU519-B05 VH PRT
QVQLVQSGAEVKKPGSSVKVSCKASGGTFSSYAISWVRQAPGQGLEWMGGIIPIFGTANYAQKFQGRVTITADESTSTAYMELSSLRSEDTAVYYCARPRVPRVWELWIGFGAFDIWGQGTMVTVSS

SEQ ID NO: 1225 - DNA, 1365 bp, Artificial Sequence
  YU519-B05 VH complete DNA
caggttcagctggtgcagtctggggctgaggtgaagaagcctgggtcctcggtgaaggtctcctgcaaggcttctggaggcaccttcagcagctatgctatcagctgggtgcgacaggcccctggacaagggcttgagtggatgggagggatcatccctatctttggtacagcaaactacgcacagaagttccagggcagagtcacgattaccgcggacgaatccacgagcacagcctacatggagctgagcagcctgagatctgaggacacggccgtgtattactgtgcgaggccccgagtcccccgagtctgggagctctggatcgggtttggtgcttttgatatctggggccaagggacaatggtcaccgtgtcttcagctagcaccaagggcccatcggtcttccccctggcaccctcctccaagagcacctctgggggcacagcggccctgggctgcctggtcaaggactacttccccgaaccggtgacggtgtcgtggaactcaggcgccctgaccagcggcgtgcacaccttcccggctgtcctacagtcctcaggactctactccctcagcagcgtggtgaccgtgccctccagcagcttgggcacccagacctacatctgcaacgtgaatcacaagcccagcaacaccaaggtggacaagaaagttgagcccaaatcttgtgacaaaactcacacatgcccaccgtgcccagcacctccagtggccggaccgtcagtcttcctcttccccccaaaacccaaggacaccctcatgatctcccggacccctgaggtcacatgcgtggtggtgggcgtgagccacgaagaccctgaggtcaagttcaactggtacgtggacggcgtggaggtgcataatgccaagacaaagccgcgggaggagcagtacaacagcacgtaccgggtggtcagcgtcctcaccgtcctgcaccaggactggctgaatggcaaggagtacaagtgcaaggtctccaacaaacagctcccatcccccatcgagaaaaccatctccaaagccaaagggcagccccgagaaccacaggtgtacaccctgcccccatcccgggatgagctgaccaagaaccaggtcagcctgacctgcctggtcaaaggcttctatcccagcgacatcgccgtggagtgggagagcaatgggcagccggagaacaactacaagaccacgcctcccgtgctggactccgacggctccttcttcctctacagcaagctcaccgtggacaagagcaggtggcagcaggggaacgtcttctcatgctccgtgatgcatgaggctctgcacaaccactacacgcagaaaagcctctccctgtccccgggt

SEQ ID NO: 1226 - protein, 455 aa, Artificial Sequence
  YU519-B05 VH complete PRT
QVQLVQSGAEVKKPGSSVKVSCKASGGTFSSYAISWVRQAPGQGLEWMGGIIPIFGTANYAQKFQGRVTITADESTSTAYMELSSLRSEDTAVYYCARPRVPRVWELWIGFGAFDIWGQGTMVTVSSASTKGPSVFPLAPSSKSTSGGTAALGCLVKDYFPEPVTVSWNSGALTSGVHTFPAVLQSSGLYSLSSVVTVPSSSLGTQTYICNVNHKPSNTKVDKKVEPKSCDKTHTCPPCPAPPVAGPSVFLFPPKPKDTLMISRTPEVTCVVVGVSHEDPEVKFNWYVDGVEVHNAKTKPREEQYNSTYRVVSVLTVLHQDWLNGKEYKCKVSNKQLPSPIEKTISKAKGQPREPQVYTLPPSRDELTKNQVSLTCLVKGFYPSDIAVEWESNGQPENNYKTTPPVLDSDGSFFLYSKLTVDKSRWQQGNVFSCSVMHEALHNHYTQKSLSLSPG

SEQ ID NO: 1227 - DNA, 645 bp, Artificial Sequence
  YU519-B05 VL complete DNA
gaaatagtgatgacgcagtctccaggcaccctgtctttgtctccaggggaaagagccaccctctcctgcagggccagtcagagtgttagcagcagctacttagcctggtaccagcagaaacctggccaggctcccaggctcctcatctatggtgcatccagcagggccactggcatcccagacaggttcagtggcagtgggtctgggacagacttcactctcaccatcagcagactggagcctgaagattttgcagtgtattactgtcagcagtatggtagctcaccctacagttttggccaggggaccaagctggagatcaaacgtacggtggctgcaccatctgtgttcatcttcccgccatctgatgagcagttgaaatctggaactgcctctgttgtgtgcctgctgaataacttctatcccagagaggccaaagtacagtggaaggtggataacgccctccaatcgggtaactcccaggagagtgtcacagagcaggacagcaaggacagcacctacagcctcagcagcaccctgacgctgagcaaagcagactacgagaaacacaaagtctacgcctgcgaagtcacccatcagggcctgagctcgcccgtcacaaagagcttcaacaggggagagtgt

SEQ ID NO: 1228 - protein, 215 aa, Artificial Sequence
  YU519-B05 VL complete PRT
EIVMTQSPGTLSLSPGERATLSCRASQSVSSSYLAWYQQKPGQAPRLLIYGASSRATGIPDRFSGSGSGTDFTLTISRLEPEDFAVYYCQQYGSSPYSFGQGTKLEIKRTVAAPSVFIFPPSDEQLKSGTASVVCLLNNFYPREAKVQWKVDNALQSGNSQESVTEQDSKDSTYSLSSTLTLSKADYEKHKVYACEVTHQGLSSPVTKSFNRGEC

SEQ ID NO: 1229 - DNA, 15 bp, Artificial Sequence
  YU519-C01 HCDR1 DNA
agctatgctatgcac

SEQ ID NO: 1230 - protein, 5 aa, Artificial Sequence
  YU519-C01 HCDR1 PRT
SYAMH

SEQ ID NO: 1231 - DNA, 51 bp, Artificial Sequence
  YU519-C01 HCDR2 DNA
gttatatcatatgatggaagcaataaatactacgcagactccgtgaagggc

SEQ ID NO: 1232 - protein, 16 aa, Artificial Sequence
  YU519-C01 HCDR2 PRT
VISYDGSNKYYADSVK

SEQ ID NO: 1233 - DNA, 15 bp, Artificial Sequence
  YU519-C01 HCDR3 DNA
gatcttttggtgaac

SEQ ID NO: 1234 - protein, 5 aa, Artificial Sequence
  YU519-C01 HCDR3 PRT
DLLVN

SEQ ID NO: 1235 - DNA, 33 bp, Artificial Sequence
  YU519-C01 LCDR1 DNA
cgggcgagtcagggcattagcaattatttagcc

SEQ ID NO: 1236 - protein, 11 aa, Artificial Sequence
  YU519-C01 LCDR1 PRT
RASQGISNYLA

SEQ ID NO: 1237 - DNA, 21 bp, Artificial Sequence
  YU519-C01 LCDR2 DNA
gctgcatccactttgcaatca

SEQ ID NO: 1238 - protein, 7 aa, Artificial Sequence
  YU519-C01 LCDR2 PRT
AASTLQS

SEQ ID NO: 1239 - DNA, 27 bp, Artificial Sequence
  YU519-C01 LCDR3 DNA
caaaagtataacagtgccccccggact

SEQ ID NO: 1240 - protein, 9 aa, Artificial Sequence
  YU519-C01 LCDR3 PRT
QKYNSAPRT

SEQ ID NO: 1241 - DNA, 321 bp, Artificial Sequence
  YU519-C01 VL DNA
gacatcgtgatgacccagtctccatcctccctgtctgcatctgtaggagacagagtcaccatcacttgccgggcgagtcagggcattagcaattatttagcctggtatcagcagaaaccagggaaagttcctaagctcctgatctatgctgcatccactttgcaatcaggggtcccatctcggttcagtggcagtggatctgggacagatttcactctcaccatcagcagcctgcagcctgaagatgttgcaacttattactgtcaaaagtataacagtgccccccggactttcggcggagggaccaaagtggatatcaaa

SEQ ID NO: 1242 - protein, 107 aa, Artificial Sequence
  YU519-C01 VL PRT
DIVMTQSPSSLSASVGDRVTITCRASQGISNYLAWYQQKPGKVPKLLIYAASTLQSGVPSRFSGSGSGTDFTLTISSLQPEDVATYYCQKYNSAPRTFGGGTKVDIK

SEQ ID NO: 1243 - DNA, 342 bp, Artificial Sequence
  YU519-C01 VH DNA
gaggtgcagctgttggagtctgggggaggcgtggtccagcctgggaggtccctgagactctcctgtgcagcctctggattcaccttcagtagctatgctatgcactgggtccgccaggctccaggcaaggggctggagtgggtggcagttatatcatatgatggaagcaataaatactacgcagactccgtgaagggccgattcaccatctccagagacaattccaagaacacgctgtatctgcaaatgaacagcctgagagctgaggacacggctgtgtattactgtgcgagagatcttttggtgaactggggccagggaaccctggtcaccgtgtcctca

SEQ ID NO: 1244 - protein, 114 aa, Artificial Sequence
  YU519-C01 VH PRT
EVQLLESGGGVVQPGRSLRLSCAASGFTFSSYAMHWVRQAPGKGLEWVAVISYDGSNKYYADSVKGRFTISRDNSKNTLYLQMNSLRAEDTAVYYCARDLLVNWGQGTLVTVSS

SEQ ID NO: 1245 - DNA, 1326 bp, Artificial Sequence
  YU519-C01 VH complete DNA
gaggtgcagctgttggagtctgggggaggcgtggtccagcctgggaggtccctgagactctcctgtgcagcctctggattcaccttcagtagctatgctatgcactgggtccgccaggctccaggcaaggggctggagtgggtggcagttatatcatatgatggaagcaataaatactacgcagactccgtgaagggccgattcaccatctccagagacaattccaagaacacgctgtatctgcaaatgaacagcctgagagctgaggacacggctgtgtattactgtgcgagagatcttttggtgaactggggccagggaaccctggtcaccgtgtcctcagctagcaccaagggcccatcggtcttccccctggcaccctcctccaagagcacctctgggggcacagcggccctgggctgcctggtcaaggactacttccccgaaccggtgacggtgtcgtggaactcaggcgccctgaccagcggcgtgcacaccttcccggctgtcctacagtcctcaggactctactccctcagcagcgtggtgaccgtgccctccagcagcttgggcacccagacctacatctgcaacgtgaatcacaagcccagcaacaccaaggtggacaagaaagttgagcccaaatcttgtgacaaaactcacacatgcccaccgtgcccagcacctccagtggccggaccgtcagtcttcctcttccccccaaaacccaaggacaccctcatgatctcccggacccctgaggtcacatgcgtggtggtgggcgtgagccacgaagaccctgaggtcaagttcaactggtacgtggacggcgtggaggtgcataatgccaagacaaagccgcgggaggagcagtacaacagcacgtaccgggtggtcagcgtcctcaccgtcctgcaccaggactggctgaatggcaaggagtacaagtgcaaggtctccaacaaacagctcccatcccccatcgagaaaaccatctccaaagccaaagggcagccccgagaaccacaggtgtacaccctgcccccatcccgggatgagctgaccaagaaccaggtcagcctgacctgcctggtcaaaggcttctatcccagcgacatcgccgtggagtgggagagcaatgggcagccggagaacaactacaagaccacgcctcccgtgctggactccgacggctccttcttcctctacagcaagctcaccgtggacaagagcaggtggcagcaggggaacgtcttctcatgctccgtgatgcatgaggctctgcacaaccactacacgcagaaaagcctctccctgtccccgggt

SEQ ID NO: 1246 - protein, 442 aa, Artificial Sequence
  YU519-C01 VH complete PRT
EVQLLESGGGVVQPGRSLRLSCAASGFTFSSYAMHWVRQAPGKGLEWVAVISYDGSNKYYADSVKGRFTISRDNSKNTLYLQMNSLRAEDTAVYYCARDLLVNWGQGTLVTVSSASTKGPSVFPLAPSSKSTSGGTAALGCLVKDYFPEPVTVSWNSGALTSGVHTFPAVLQSSGLYSLSSVVTVPSSSLGTQTYICNVNHKPSNTKVDKKVEPKSCDKTHTCPPCPAPPVAGPSVFLFPPKPKDTLMISRTPEVTCVVVGVSHEDPEVKFNWYVDGVEVHNAKTKPREEQYNSTYRVVSVLTVLHQDWLNGKEYKCKVSNKQLPSPIEKTISKAKGQPREPQVYTLPPSRDELTKNQVSLTCLVKGFYPSDIAVEWESNGQPENNYKTTPPVLDSDGSFFLYSKLTVDKSRWQQGNVFSCSVMHEALHNHYTQKSLSLSPG

SEQ ID NO: 1247 - DNA, 642 bp, Artificial Sequence
  YU519-C01 VL complete DNA
gacatcgtgatgacccagtctccatcctccctgtctgcatctgtaggagacagagtcaccatcacttgccgggcgagtcagggcattagcaattatttagcctggtatcagcagaaaccagggaaagttcctaagctcctgatctatgctgcatccactttgcaatcaggggtcccatctcggttcagtggcagtggatctgggacagatttcactctcaccatcagcagcctgcagcctgaagatgttgcaacttattactgtcaaaagtataacagtgccccccggactttcggcggagggaccaaagtggatatcaaacgtacggtggctgcaccatctgtgttcatcttcccgccatctgatgagcagttgaaatctggaactgcctctgttgtgtgcctgctgaataacttctatcccagagaggccaaagtacagtggaaggtggataacgccctccaatcgggtaactcccaggagagtgtcacagagcaggacagcaaggacagcacctacagcctcagcagcaccctgacgctgagcaaagcagactacgagaaacacaaagtctacgcctgcgaagtcacccatcagggcctgagctcgcccgtcacaaagagcttcaacaggggagagtgt

SEQ ID NO: 1248 - protein, 214 aa, Artificial Sequence
  YU519-C01 VL complete PRT
DIVMTQSPSSLSASVGDRVTITCRASQGISNYLAWYQQKPGKVPKLLIYAASTLQSGVPSRFSGSGSGTDFTLTISSLQPEDVATYYCQKYNSAPRTFGGGTKVDIKRTVAAPSVFIFPPSDEQLKSGTASVVCLLNNFYPREAKVQWKVDNALQSGNSQESVTEQDSKDSTYSLSSTLTLSKADYEKHKVYACEVTHQGLSSPVTKSFNRGEC

SEQ ID NO: 1249 - DNA, 15 bp, Artificial Sequence
  YU519-E03 HCDR1 DNA
agctatgctatcagc

SEQ ID NO: 1250 - protein, 5 aa, Artificial Sequence
  YU519-E03 HCDR1 PRT
SYAIS

SEQ ID NO: 1251 - DNA, 51 bp, Artificial Sequence; identical to SEQ ID NO: 911
  YU519-E03 HCDR2 DNA

SEQ ID NO: 1252 - protein, 16 aa, Artificial Sequence
  YU519-E03 HCDR2 PRT
GIIPIFGTANYAQKFQ

SEQ ID NO: 1253 - DNA, 27 bp, Artificial Sequence
  YU519-E03 HCDR3 DNA
ggtgggagctacttgccctttgactac

SEQ ID NO: 1254 - protein, 9 aa, Artificial Sequence
  YU519-E03 HCDR3 PRT
GGSYLPFDY

SEQ ID NO: 1255 - DNA, 33 bp, Artificial Sequence
  YU519-E03 LCDR1 DNA
agggccagtcagagtgttagcagctacttagcc

SEQ ID NO: 1256 - protein, 11 aa, Artificial Sequence
  YU519-E03 LCDR1 PRT
RASQSVSSYLA

SEQ ID NO: 1257 - DNA, 21 bp, Artificial Sequence
  YU519-E03 LCDR2 DNA
gatgcatccaacagggccact

SEQ ID NO: 1258 - protein, 7 aa, Artificial Sequence
  YU519-E03 LCDR2 PRT
DASNRAT

SEQ ID NO: 1259 - DNA, 27 bp, Artificial Sequence
  YU519-E03 LCDR3 DNA
cagcaacgtagcaactggcctccgact

SEQ ID NO: 1260 - protein, 9 aa, Artificial Sequence
  YU519-E03 LCDR3 PRT
QQRSNWPPT

SEQ ID NO: 1261 - DNA, 321 bp, Artificial Sequence
  YU519-E03 VL DNA
gaaatagtgatgacgcagtctccagccaccctgtctttgtctccaggggaaagagccaccctctcctgcagggccagtcagagtgttagcagctacttagcctggtaccaacagaaacctggccaggctcccaggctcctcatctatgatgcatccaacagggccactggcatcccagccaggttcagtggcagtgggtctgggacagacttcactctcaccatcagcagcctagagcctgaagattttgccgtttattactgtcagcaacgtagcaactggcctccgactttcggcggagggaccaagctggagatcaaa

SEQ ID NO: 1262 - protein, 107 aa, Artificial Sequence
  YU519-E03 VL PRT
EIVMTQSPATLSLSPGERATLSCRASQSVSSYLAWYQQKPGQAPRLLIYDASNRATGIPARFSGSGSGTDFTLTISSLEPEDFAVYYCQQRSNWPPTFGGGTKLEIK

SEQ ID NO: 1263 - DNA, 354 bp, Artificial Sequence
  YU519-E03 VH DNA
caggtgcagctggtgcagtctggggctgaggtgaagaagcctgggtcctcggtgaaggtctcctgcaaggcttctggaggcaccttcagcagctatgctatcagctgggtgcgacaggcccctggacaagggcttgagtggatgggagggatcatccctatctttggtacagcaaactacgcacagaagttccagggcagagtcacgattaccgcggacgaatccacgagcacagcctacatggagctgagcagcctgagatctgaggacacggccgtgtattactgtgcgagaggtgggagctacttgccctttgactactggggccagggaaccctggtcaccgtgtcctca

SEQ ID NO: 1264 - protein, 118 aa, Artificial Sequence
  YU519-E03 VH PRT
QVQLVQSGAEVKKPGSSVKVSCKASGGTFSSYAISWVRQAPGQGLEWMGGIIPIFGTANYAQKFQGRVTITADESTSTAYMELSSLRSEDTAVYYCARGGSYLPFDYWGQGTLVTVSS

SEQ ID NO: 1265 - DNA, 1338 bp, Artificial Sequence
  YU519-E03 VH complete DNA
caggtgcagctggtgcagtctggggctgaggtgaagaagcctgggtcctcggtgaaggtctcctgcaaggcttctggaggcaccttcagcagctatgctatcagctgggtgcgacaggcccctggacaagggcttgagtggatgggagggatcatccctatctttggtacagcaaactacgcacagaagttccagggcagagtcacgattaccgcggacgaatccacgagcacagcctacatggagctgagcagcctgagatctgaggacacggccgtgtattactgtgcgagaggtgggagctacttgccctttgactactggggccagggaaccctggtcaccgtgtcctcagctagcaccaagggcccatcggtcttccccctggcaccctcctccaagagcacctctgggggcacagcggccctgggctgcctggtcaaggactacttccccgaaccggtgacggtgtcgtggaactcaggcgccctgaccagcggcgtgcacaccttcccggctgtcctacagtcctcaggactctactccctcagcagcgtggtgaccgtgccctccagcagcttgggcacccagacctacatctgcaacgtgaatcacaagcccagcaacaccaaggtggacaagaaagttgagcccaaatcttgtgacaaaactcacacatgcccaccgtgcccagcacctccagtggccggaccgtcagtcttcctcttccccccaaaacccaaggacaccctcatgatctcccggacccctgaggtcacatgcgtggtggtgggcgtgagccacgaagaccctgaggtcaagttcaactggtacgtggacggcgtggaggtgcataatgccaagacaaagccgcgggaggagcagtacaacagcacgtaccgggtggtcagcgtcctcaccgtcctgcaccaggactggctgaatggcaaggagtacaagtgcaaggtctccaacaaacagctcccatcccccatcgagaaaaccatctccaaagccaaagggcagccccgagaaccacaggtgtacaccctgcccccatcccgggatgagctgaccaagaaccaggtcagcctgacctgcctggtcaaaggcttctatcccagcgacatcgccgtggagtgggagagcaatgggcagccggagaacaactacaagaccacgcctcccgtgctggactccgacggctccttcttcctctacagcaagctcaccgtggacaagagcaggtggcagcaggggaacgtcttctcatgctccgtgatgcatgaggctctgcacaaccactacacgcagaaaagcctctccctgtccccgggt

SEQ ID NO: 1266 - protein, 446 aa, Artificial Sequence
  YU519-E03 VH complete PRT
QVQLVQSGAEVKKPGSSVKVSCKASGGTFSSYAISWVRQAPGQGLEWMGGIIPIFGTANYAQKFQGRVTITADESTSTAYMELSSLRSEDTAVYYCARGGSYLPFDYWGQGTLVTVSSASTKGPSVFPLAPSSKSTSGGTAALGCLVKDYFPEPVTVSWNSGALTSGVHTFPAVLQSSGLYSLSSVVTVPSSSLGTQTYICNVNHKPSNTKVDKKVEPKSCDKTHTCPPCPAPPVAGPSVFLFPPKPKDTLMISRTPEVTCVVVGVSHEDPEVKFNWYVDGVEVHNAKTKPREEQYNSTYRVVSVLTVLHQDWLNGKEYKCKVSNKQLPSPIEKTISKAKGQPREPQVYTLPPSRDELTKNQVSLTCLVKGFYPSDIAVEWESNGQPENNYKTTPPVLDSDGSFFLYSKLTVDKSRWQQGNVFSCSVMHEALHNHYTQKSLSLSPG

SEQ ID NO: 1267 - DNA, 642 bp, Artificial Sequence
  YU519-E03 VL complete DNA
gaaatagtgatgacgcagtctccagccaccctgtctttgtctccaggggaaagagccaccctctcctgcagggccagtcagagtgttagcagctacttagcctggtaccaacagaaacctggccaggctcccaggctcctcatctatgatgcatccaacagggccactggcatcccagccaggttcagtggcagtgggtctgggacagacttcactctcaccatcagcagcctagagcctgaagattttgccgtttattactgtcagcaacgtagcaactggcctccgactttcggcggagggaccaagctggagatcaaacgtacggtggctgcaccatctgtgttcatcttcccgccatctgatgagcagttgaaatctggaactgcctctgttgtgtgcctgctgaataacttctatcccagagaggccaaagtacagtggaaggtggataacgccctccaatcgggtaactcccaggagagtgtcacagagcaggacagcaaggacagcacctacagcctcagcagcaccctgacgctgagcaaagcagactacgagaaacacaaagtctacgcctgcgaagtcacccatcagggcctgagctcgcccgtcacaaagagcttcaacaggggagagtgt

SEQ ID NO: 1268 - protein, 214 aa, Artificial Sequence
  YU519-E03 VL complete PRT
EIVMTQSPATLSLSPGERATLSCRASQSVSSYLAWYQQKPGQAPRLLIYDASNRATGIPARFSGSGSGTDFTLTISSLEPEDFAVYYCQQRSNWPPTFGGGTKLEIKRTVAAPSVFIFPPSDEQLKSGTASVVCLLNNFYPREAKVQWKVDNALQSGNSQESVTEQDSKDSTYSLSSTLTLSKADYEKHKVYACEVTHQGLSSPVTKSFNRGEC

SEQ ID NO: 1269 - DNA, 15 bp, Artificial Sequence
  YU519-E12 HCDR1 DNA
agctatgctatcagc

SEQ ID NO: 1270 - protein, 5 aa, Artificial Sequence
  YU519-E12 HCDR1 PRT
SYAIS

SEQ ID NO: 1271 - DNA, 51 bp, Artificial Sequence; identical to SEQ ID NO: 911
  YU519-E12 HCDR2 DNA

SEQ ID NO: 1272 - protein, 16 aa, Artificial Sequence
  YU519-E12 HCDR2 PRT
GIIPIFGTANYAQKFQ

SEQ ID NO: 1273 - DNA, 39 bp, Artificial Sequence
  YU519-E12 HCDR3 DNA
gatttgtacagctatggcccctggtactactttgactac

SEQ ID NO: 1274 - protein, 13 aa, Artificial Sequence
  YU519-E12 HCDR3 PRT
DLYSYGPWYYFDY

SEQ ID NO: 1275 - DNA, 33 bp, Artificial Sequence
  YU519-E12 LCDR1 DNA
cgggcaagtcagagcattgacaactatttaaat

SEQ ID NO: 1276 - protein, 11 aa, Artificial Sequence
  YU519-E12 LCDR1 PRT
RASQSIDNYLN

SEQ ID NO: 1277 - DNA, 21 bp, Artificial Sequence
  YU519-E12 LCDR2 DNA
actgcatccagtttgcaaagt

SEQ ID NO: 1278 - protein, 7 aa, Artificial Sequence
  YU519-E12 LCDR2 PRT
TASSLQS

SEQ ID NO: 1279 - DNA, 27 bp, Artificial Sequence
  YU519-E12 LCDR3 DNA
caacagagttacaatacccctcccact

SEQ ID NO: 1280 - protein, 9 aa, Artificial Sequence
  YU519-E12 LCDR3 PRT
QQSYNTPPT

SEQ ID NO: 1281 - DNA, 321 bp, Artificial Sequence
  YU519-E12 VL DNA
gacatcgtgatgacccagtctccatcctccctgtctgcatctgtaggagacagagtcaccatcacttgccgggcaagtcagagcattgacaactatttaaattggtatcagcagaaaccagggaaagcccctaagctcctgatctatactgcatccagtttgcaaagtggggtcccatcaaggttcagtggcagtggatctgggacagatttcactctcaccatcagcagtctgcaacctgaagattttgcaacttactactgccaacagagttacaatacccctcccactttcggccctgggaccaaggtggaaatcaaa

SEQ ID NO: 1282 - protein, 107 aa, Artificial Sequence
  YU519-E12 VL PRT
DIVMTQSPSSLSASVGDRVTITCRASQSIDNYLNWYQQKPGKAPKLLIYTASSLQSGVPSRFSGSGSGTDFTLTISSLQPEDFATYYCQQSYNTPPTFGPGTKVEIK

SEQ ID NO: 1283 - DNA, 366 bp, Artificial Sequence
  YU519-E12 VH DNA
caggttcagctggtgcagtctggggctgaggtgaagaagcctgggtcctcggtgaaggtctcctgcaaggcttctggaggcaccttcagcagctatgctatcagctgggtgcgacaggcccctggacaagggcttgagtggatgggagggatcatccctatctttggtacagcaaactacgcacagaagttccagggcagagtcacgattaccgcggacgaatccacgagcacagcctacatggagctgagcagcctgagatctgaggacacggccgtgtattactgtgcgagagatttgtacagctatggcccctggtactactttgactactggggccagggaaccctggtcaccgtgtcctca

SEQ ID NO: 1284 - protein, 122 aa, Artificial Sequence
  YU519-E12 VH PRT
QVQLVQSGAEVKKPGSSVKVSCKASGGTFSSYAISWVRQAPGQGLEWMGGIIPIFGTANYAQKFQGRVTITADESTSTAYMELSSLRSEDTAVYYCARDLYSYGPWYYFDYWGQGTLVTVSS

SEQ ID NO: 1285 - DNA, 1350 bp, Artificial Sequence
  YU519-E12 VH complete DNA
caggttcagctggtgcagtctggggctgaggtgaagaagcctgggtcctcggtgaaggtctcctgcaaggcttctggaggcaccttcagcagctatgctatcagctgggtgcgacaggcccctggacaagggcttgagtggatgggagggatcatccctatctttggtacagcaaactacgcacagaagttccagggcagagtcacgattaccgcggacgaatccacgagcacagcctacatggagctgagcagcctgagatctgaggacacggccgtgtattactgtgcgagagatttgtacagctatggcccctggtactactttgactactggggccagggaaccctggtcaccgtgtcctcagctagcaccaagggcccatcggtcttccccctggcaccctcctccaagagcacctctgggggcacagcggccctgggctgcctggtcaaggactacttccccgaaccggtgacggtgtcgtggaactcaggcgccctgaccagcggcgtgcacaccttcccggctgtcctacagtcctcaggactctactccctcagcagcgtggtgaccgtgccctccagcagcttgggcacccagacctacatctgcaacgtgaatcacaagcccagcaacaccaaggtggacaagaaagttgagcccaaatcttgtgacaaaactcacacatgcccaccgtgcccagcacctccagtggccggaccgtcagtcttcctcttccccccaaaacccaaggacaccctcatgatctcccggacccctgaggtcacatgcgtggtggtgggcgtgagccacgaagaccctgaggtcaagttcaactggtacgtggacggcgtggaggtgcataatgccaagacaaagccgcgggaggagcagtacaacagcacgtaccgggtggtcagcgtcctcaccgtcctgcaccaggactggctgaatggcaaggagtacaagtgcaaggtctccaacaaacagctcccatcccccatcgagaaaaccatctccaaagccaaagggcagccccgagaaccacaggtgtacaccctgcccccatcccgggatgagctgaccaagaaccaggtcagcctgacctgcctggtcaaaggcttctatcccagcgacatcgccgtggagtgggagagcaatgggcagccggagaacaactacaagaccacgcctcccgtgctggactccgacggctccttcttcctctacagcaagctcaccgtggacaagagcaggtggcagcaggggaacgtcttctcatgctccgtgatgcatgaggctctgcacaaccactacacgcagaaaagcctctccctgtccccgggt

SEQ ID NO: 1286 - protein, 450 aa, Artificial Sequence
  YU519-E12 VH complete PRT
QVQLVQSGAEVKKPGSSVKVSCKASGGTFSSYAISWVRQAPGQGLEWMGGIIPIFGTANYAQKFQGRVTITADESTSTAYMELSSLRSEDTAVYYCARDLYSYGPWYYFDYWGQGTLVTVSSASTKGPSVFPLAPSSKSTSGGTAALGCLVKDYFPEPVTVSWNSGALTSGVHTFPAVLQSSGLYSLSSVVTVPSSSLGTQTYICNVNHKPSNTKVDKKVEPKSCDKTHTCPPCPAPPVAGPSVFLFPPKPKDTLMISRTPEVTCVVVGVSHEDPEVKFNWYVDGVEVHNAKTKPREEQYNSTYRVVSVLTVLHQDWLNGKEYKCKVSNKQLPSPIEKTISKAKGQPREPQVYTLPPSRDELTKNQVSLTCLVKGFYPSDIAVEWESNGQPENNYKTTPPVLDSDGSFFLYSKLTVDKSRWQQGNVFSCSVMHEALHNHYTQKSLSLSPG

SEQ ID NO: 1287 - DNA, 642 bp, Artificial Sequence
  YU519-E12 VL complete DNA
gacatcgtgatgacccagtctccatcctccctgtctgcatctgtaggagacagagtcaccatcacttgccgggcaagtcagagcattgacaactatttaaattggtatcagcagaaaccagggaaagcccctaagctcctgatctatactgcatccagtttgcaaagtggggtcccatcaaggttcagtggcagtggatctgggacagatttcactctcaccatcagcagtctgcaacctgaagattttgcaacttactactgccaacagagttacaatacccctcccactttcggccctgggaccaaggtggaaatcaaacgtacggtggctgcaccatctgtgttcatcttcccgccatctgatgagcagttgaaatctggaactgcctctgttgtgtgcctgctgaataacttctatcccagagaggccaaagtacagtggaaggtggataacgccctccaatcgggtaactcccaggagagtgtcacagagcaggacagcaaggacagcacctacagcctcagcagcaccctgacgctgagcaaagcagactacgagaaacacaaagtctacgcctgcgaagtcacccatcagggcctgagctcgcccgtcacaaagagcttcaacaggggagagtgt

SEQ ID NO: 1288 - protein, 214 aa, Artificial Sequence
  YU519-E12 VL complete PRT
DIVMTQSPSSLSASVGDRVTITCRASQSIDNYLNWYQQKPGKAPKLLIYTASSLQSGVPSRFSGSGSGTDFTLTISSLQPEDFATYYCQQSYNTPPTFGPGTKVEIKRTVAAPSVFIFPPSDEQLKSGTASVVCLLNNFYPREAKVQWKVDNALQSGNSQESVTEQDSKDSTYSLSSTLTLSKADYEKHKVYACEVTHQGLSSPVTKSFNRGEC

SEQ ID NO: 1289 - protein, 123 aa, artificial sequence
  PHE162-D2
QLQLQESGPGLVKPSQTLSLTCTVSGSSISSGGYYWSWIRQHPGKGLEWIGYIYYSGSTYYNPSLKSRVTISVDTSKNQFSLKLSSVTAADTAVYYCARRLNNWKTQPYFDYWGQGTLVTVSS

SEQ ID NO: 1290 - protein, 10 aa, artificial sequence
  CDR1 VH PHE162-D2
GSSISSGGYY

SEQ ID NO: 1291 - protein, 7 aa, artificial sequence
  CDR2 VH PHE162-D2
IYYSGST

SEQ ID NO: 1292 - protein, 15 aa, artificial sequence
  CDR3 VH PHE162-D2
ARRLNNWKTQPYFDY

SEQ ID NO: 1293 - protein, 111 aa, artificial sequence
  VL PHE162-D2
QSVLTQPPSVSGAPGQRVTISCTGSSPNIGAGYDVHWYQQLPGTAPKLLIYGNSNRPSGVPDRFSGSKSGTSASLAITGLQAEDEADYYCQSYDSSLSDVVFGGGTKLTVL

SEQ ID NO: 1294 - protein, 9 aa, artificial sequence
  CDR1 VL PHE162-D2
SPNIGAGYD

SEQ ID NO: 1295 - protein, 3 aa, artificial sequence
  CDR2 VL PHE162-D2
GNS

SEQ ID NO: 1296 - protein, 11 aa, artificial sequence
  CDR3 VL PHE162-D2
QSYDSSLSDVV

SEQ ID NO: 1297 - protein, 116 aa, artificial sequence
  VH STE90-A10
EVQLLESGGGLVQPGGSLRLSCAASGLTVSSNYMSWVRQAPGKGLEWVSVIYSGGSTYYADSVKGRFTISRDNSKNTLYLQMNSLRAEDTAVYYCARDVADAFDIWGQGTMVTVSS

SEQ ID NO: 1298 - protein, 8 aa, artificial sequence
  CDR1 VH STE90-A10
GLTVSSNY

SEQ ID NO: 1299 - protein, 7 aa, artificial sequence
  CDR2 VH STE90-A10
IYSGGST

SEQ ID NO: 1300 - protein, 10 aa, artificial sequence
  CDR3 VH STE90-A10
ARDVADAFDI

SEQ ID NO: 1301 - protein, 107 aa, artificial sequence
  VL STE90-A10
DIVMTQSPSSVSASVGDRVTITCRASQGISSWLAWYQQKPGKAPKLLIYKASSLGSGVPSRFSGSGSGTEFTLTISSLQPDDFATYHCQQYNSYPVTFGQGTKVEIK

SEQ ID NO: 1302 - protein, 6 aa, artificial sequence
  CDR1 STE90-A10
QGISSW

SEQ ID NO: 1303 - protein, 3 aa, artificial sequence
  CDR2 VL STE90-A10
KAS

SEQ ID NO: 1304 - protein, 9 aa, artificial sequence
  CDR3 VL STE90-A10
QQYNSYPVT

SEQ ID NO: 1305 - protein, 116 aa, artificial sequence
  VH STE90-C11
QVQLVESGGGLVQPGGSLRLSCAASGLTVSSNYMSWVRQAPGKGLEWVSVIYSGGSTYYADSVKGRFTISRDDSKNTLYLQMNSLRAEDTAVYYCARDVADAFDIWGQGTMVTVSS

SEQ ID NO: 1306 - protein, 8 aa, artificial sequence
  CDR1 VH STE90-C11
GLTVSSNY

SEQ ID NO: 1307 - protein, 7 aa, artificial sequence
  CDR2 VH STE90-C11
IYSGGST

SEQ ID NO: 1308 - protein, 10 aa, artificial sequence
  CDR3 VH STE90-C11
ARDVADAFDI

SEQ ID NO: 1309 - protein, 108 aa, artificial sequence
  VL STE90-C11
DIVMTQSPSFLSASVGDRVTITCRASQGISSYLAWYQQKPGKAPKLLIYAASTLQSGVPSRFSGSGSGTEFTLTISSLQPEDFATYYCQQLNSYPPFTFGPGTKVDIK

SEQ ID NO: 1310 - protein, 6 aa, artificial sequence
  CDR1 VL STE90-C11
QGISSY

SEQ ID NO: 1311 - protein, 3 aa, artificial sequence
  CDR2 VL STE90-C11
AAS

SEQ ID NO: 1312 - protein, 10 aa, artificial sequence
  CDR3 VL STE90-C11
QQLNSYPPFT

SEQ ID NO: 1313 - protein, 116 aa, artificial sequence
  VH STE90-D7
QVQLVQSGGGLVQPGGSLRLSCAASGLTVSSNYMSWVRQAPGKGLEWVSVIYSGGSTYYADSVKGRFTISRDDSKNTLYLQMNSLRAEDTAVYYCARDVADAFDIWGQGTMVTVSS

SEQ ID NO: 1314 - protein, 8 aa, artificial sequence
  CDR1 VH STE90-D7
GLTVSSNY

SEQ ID NO: 1315 - protein, 7 aa, artificial sequence
  CDR2 VH STE90-D7
IYSGGST

SEQ ID NO: 1316 - protein, 10 aa, artificial sequence
  CDR3 VH STE90-D7
ARDVADAFDI

SEQ ID NO: 1317 - protein, 107 aa, artificial sequence
  VL STE90-D7
DIVMTQSPSSVSASVGDRVTITCRASQGISSWLAWYQQKPGKAPKLLIYAASSLQSGVPSRFSGSGSGTDFTLTISSLQPEDFATYYCQQANSLPLTFGPGTKVDIK

SEQ ID NO: 1318 - protein, 6 aa, artificial sequence
  CDR1 VL STE90-D7
QGISSW

SEQ ID NO: 1319 - protein, 3 aa, artificial sequence
  CDR2 VL STE90-D7
AAS

SEQ ID NO: 1320 - protein, 9 aa, artificial sequence
  CDR3 VL STE90-D7
QQANSLPLT

SEQ ID NO: 1321 - protein, 116 aa, artificial sequence
  VH STE90-G2
QVQLVESGGGLVQPGGSLRLSCAASGLTVSSNYMSWVRQAPGKGLEWVSVIYSGGSTYYADSVKGRFTISRDNSKNTLYLQMNSLRAEDTAVYYCARDVADAFDIWGQGTMVTVSS

SEQ ID NO: 1322 - protein, 8 aa, artificial sequence
  CDR1 VH STE90-G2
GLTVSSNY

SEQ ID NO: 1323 - protein, 7 aa, artificial sequence
  CDR2 VH STE90-G2
IYSGGST

SEQ ID NO: 1324 - protein, 10 aa, artificial sequence
  CDR3 VH STE90-G2
ARDVADAFDI

SEQ ID NO: 1325 - protein, 109 aa, artificial sequence
  VL STE90-G2
DIQMTQSPSSVSASVGDRVTITCRASQGISSWLAWYQQKPGKAPKLLIYAASSLQSGVPSRFSGSGSGTDFTLTISSLQPEDFATYYCQQANSFPPLFTFGPGTKVDIK

SEQ ID NO: 1326 - protein, 6 aa, artificial sequence
  CDR1 VL STE90-G2
QGISSW

SEQ ID NO: 1327 - protein, 3 aa, artificial sequence
  CDR2 VL STE90-G2
AAS

SEQ ID NO: 1328 - protein, 11 aa, artificial sequence
  CDR3 VL STE90-G2
QQANSFPPLFT

SEQ ID NO: 1329 - protein, 116 aa, artificial sequence
  VH STE90-B1-A10
EVQLVESGGGLVQPGGSLRLSCAASGLTVSSNYMSWVRQAPGKGLEWVSVIYSGGSTYYADSVKGRFTISRDNSKNTLYLQMNSLRAEDTAVYYCARDVADAFDIWGQGTMVTVSS

SEQ ID NO: 1330 - protein, 8 aa, artificial sequence
  CDR1 VH STE90-B1-A10
GLTVSSNY

SEQ ID NO: 1331 - protein, 7 aa, artificial sequence
  CDR2 VH STE90-B1-A10
IYSGGST

SEQ ID NO: 1332 - protein, 10 aa, artificial sequence
  CDR3 VH STE90-B1-A10
ARDVADAFDI

SEQ ID NO: 1333 - protein, 107 aa, artificial sequence
  VL STE90-B1-A10
DVVMTQSPSTLSASVGDRVTITCRASQSIGSWLAWYQQKPGKAPKLLIYKASSLESGVPSRFSGSGSGTEFTLTISSLQPDDFATYYCQQYNSYPVTFGQGTKVEIK

SEQ ID NO: 1334 - protein, 6 aa, artificial sequence
  CDR1 VL STE90-B1-A10
QSIGSW

SEQ ID NO: 1335 - protein, 3 aa, artificial sequence
  CDR2 VL STE90-B1-A10
KAS

SEQ ID NO: 1336 - protein, 9 aa, artificial sequence
  CDR3 VL STE90-B1-A10
QQYNSYPVT

SEQ ID NO: 1337 - protein, 116 aa, artificial sequence; identical to SEQ ID NO: 1305
  VH STE90-B1-B4

SEQ ID NO: 1338 - protein, 8 aa, artificial sequence
  CDR1 VH STE90-B1-B4
GLTVSSNY

SEQ ID NO: 1339 - protein, 7 aa, artificial sequence
  CDR2 VH STE90-B1-B4
IYSGGST

SEQ ID NO: 1340 - protein, 10 aa, artificial sequence
  VH STE90-B1-B4
ARDVADAFDI

SEQ ID NO: 1341 - protein, 107 aa, artificial sequence
  VL STE90-B1-B4
DIQMTQSPSSLSASVGDRVTITCRASQSISTYLHWYQHKPGKAPQLLIYGASRLESGVPSRFSGSGSGTEFTLTISSLQPEDFATYYCQQSYNTPLTFGGGTRVEIK

SEQ ID NO: 1342 - protein, 6 aa, artificial sequence
  CDR1 VL STE90-B1-B4
QSISTY

SEQ ID NO: 1343 - protein, 3 aa, artificial sequence
  CDR2 VL STE90-B1-B4
GAS

SEQ ID NO: 1344 - protein, 9 aa, artificial sequence
  CDR3 VL STE90-B1-B4
QQSYNTPLT

SEQ ID NO: 1345 - protein, 116 aa, artificial sequence; identical to SEQ ID NO: 1321
  VH STE90-B1-D1

SEQ ID NO: 1346 - protein, 8 aa, artificial sequence
  CDR1 VH STE90-B1-D1
GLTVSSNY

SEQ ID NO: 1347 - protein, 7 aa, artificial sequence
  CDR2 VH STE90-B1-D1
IYSGGST

SEQ ID NO: 1348 - protein, 10 aa, artificial sequence
  CDR3 VH STE90-B1-D1
ARDVADAFDI

SEQ ID NO: 1349 - protein, 107 aa, artificial sequence
  VL STE90-B1-D1
DVVMTQSPSFLSASVGDRVTITCRASQGISSYLAWYQQKPGKAPKLLIYAASTLQSGVPSRFSGSGSGTEFTLTISSLQPEDFATYYCQQLNSYPITFGQGTRLEIK

SEQ ID NO: 1350 - protein, 6 aa, artificial sequence
  CDR1 VL STE90-B1-D1
QGISSY

SEQ ID NO: 1351 - protein, 3 aa, artificial sequence
  CDR2 VL STE90-B1-D1
AAS

SEQ ID NO: 1352 - protein, 9 aa, artificial sequence
  CDR3 VL STE90-B1-D1
QQLNSYPIT

SEQ ID NO: 1353 - protein, 120 aa, artificial sequence
  VH STE90-B1-D6
QVQLVESGGGLIQPGGSLRLSCAASGLTVSSNYMSWVRQAPGKGLEWVSVIYSGGSTYYADSVKGRFTISRDNSKNTLYLQMNSLRAEDTAVYYCAREGLVGATTAFDYWGQGTLVTVSS

SEQ ID NO: 1354 - protein, 8 aa, artificial sequence
  CDR1 VH STE90-B1-D6
GLTVSSNY

SEQ ID NO: 1355 - protein, 7 aa, artificial sequence
  CDR2 VH STE90-B1-D6
IYSGGST

SEQ ID NO: 1356 - protein, 14 aa, artificial sequence
  CDR3 VH STE90-B1-D6
AREGLVGATTAFDY

SEQ ID NO: 1357 - protein, 108 aa, artificial sequence
  VL STE90-B1-D6
DIVMTQSPSSLSASVGDRVTITCRASQSISSYLNWYQQKPGKAPKLLIYAASSLQSGVPSRFSGSGSGTDFTLTISSLQPEDFATYYCQQSYSMPPSTFGQGTKLEIK

SEQ ID NO: 1358 - protein, 6 aa, artificial sequence
  CDR1 VL STE90-B1-D6
QSISSY

SEQ ID NO: 1359 - protein, 3 aa, artificial sequence
  CDR2 VL STE90-B1-D6
AAS

SEQ ID NO: 1360 - protein, 10 aa, artificial sequence
  CDR3 VL STE90-B1-D6
QQSYSMPPST

SEQ ID NO: 1361 - protein, 120 aa, artificial sequence
  VH STE90-B1-F8
EVQLLESGGGLIQPGGSLRLSCAASGFTVSSNYMSWVRQAPGKGLEWVSVIYSGGSTYYADSVKGRFTISRDNSKNTLYLQMNSLRAEDTAVYYCAREGLVGATTAFDYWGQGTLVTVSS

SEQ ID NO: 1362 - protein, 8 aa, artificial sequence
  CDR1 VH STE90-B1-F8
GFTVSSNY

SEQ ID NO: 1363 - protein, 7 aa, artificial sequence
  CD2 VH STE90-B1-F8
IYSGGST

SEQ ID NO: 1364 - protein, 14 aa, artificial sequence
  CDR3 VH STE90-B1-F8
AREGLVGATTAFDY

SEQ ID NO: 1365 - protein, 108 aa, artificial sequence
  VL STE90-B1-F8
DIQMTQSPSSLSASVGDRVTITCRASQSISSYLNWYQQKPGKAPKLLIYAASSLQSGVPSRFSGSGSGTDFTLTISSLQPEDFATYYCQQSYSTPPVTFGPGTKVDIK

SEQ ID NO: 1366 - protein, 6 aa, artificial sequence
  CDR1 VL STE90-B1-F8
QSISSY

SEQ ID NO: 1367 - protein, 3 aa, artificial sequence
  CDR2 VL STE90-B1-F8
AAS

SEQ ID NO: 1368 - protein, 10 aa, artificial sequence
  CDR3 VL STE90-B1-F8
QQSYSTPPVT

SEQ ID NO: 1369 - protein, 116 aa, artificial sequence; identical to SEQ ID NO: 1305
  VH STE90-B2-A1

SEQ ID NO: 1370 - protein, 8 aa, artificial sequence
  CDR1 VH STE90-B2-A1
GLTVSSNY

SEQ ID NO: 1371 - protein, 7 aa, artificial sequence
  CDR2 VH STE90-B2-A1
IYSGGST

SEQ ID NO: 1372 - protein, 10 aa, artificial sequence
  CDR3 VH STE90-B2-A1
ARDVADAFDI

SEQ ID NO: 1373 - protein, 103 aa, artificial sequence
  VL STE90-B2-A1
DIVMTQSPSSLSASVGDRVTITCRASQSISSYLNWYQQKPGKAPKLLIYAASSLQSGVPSRFSGSGSGTDFTLTISSLQPEDFATYYCQQRDTFGQGTKLEIK

SEQ ID NO: 1374 - protein, 6 aa, artificial sequence
  CDR1 VL STE90-B2-A1
QSISSY

SEQ ID NO: 1375 - protein, 3 aa, artificial sequence
  CDR2 VL STE90-B2-A1
AAS

SEQ ID NO: 1376 - protein, 5 aa, artificial sequence
  CDR3 VL STE90-B2-A1
QQRDT

SEQ ID NO: 1377 - protein, 116 aa, artificial sequence
  VH STE90-B2-B3
EVQLVESGGGLVQPGGSLRLSCAASGLTVSSNYMSWVRQAPGKGLEWVSVIYSGGSTYYADSVKGRFTISRDNSKNTLYLQMNSLRAEDTAVYYCARDVADVFDIWGQGTMVTVSS

SEQ ID NO: 1378 - protein, 8 aa, artificial sequence
  CDR1 VH STE90-B2-B3
GLTVSSNY

SEQ ID NO: 1379 - protein, 7 aa, artificial sequence
  CDR2 VH STE90-B2-B3
IYSGGST

SEQ ID NO: 1380 - protein, 10 aa, artificial sequence
  CDR3 VH STE90-B2-B3
ARDVADVFDI

SEQ ID NO: 1381 - protein, 107 aa, artificial sequence
  VL STE90-B2-B3
DIQMTQSPSTLSASVGDRVTITCRASQSISSWLAWYQQKPGKAPKLLIYKASSLESGVPSRFSGSGSGTEFTLTISSLQPDDFATYYCQQYNSYPPTFGQGTKVEIK

SEQ ID NO: 1382 - protein, 6 aa, artificial sequence
  CDR1 VL STE90-B2-B3
QSISSW

SEQ ID NO: 1383 - protein, 3 aa, artificial sequence
  CDR2 VL STE90-B2-B3
KAS

SEQ ID NO: 1384 - protein, 9 aa, artificial sequence
  CDR3 VL STE90-B2-B3
QQYNSYPPT

SEQ ID NO: 1385 - protein, 116 aa, artificial sequence; identical to SEQ ID NO: 1321
  VH STE90-B2-C5

SEQ ID NO: 1386 - protein, 8 aa, artificial sequence
  CDR1 VH STE90-B2-C5
GLTVSSNY

SEQ ID NO: 1387 - protein, 7 aa, artificial sequence
  CDR2 VH STE90-B2-C5
IYSGGST

SEQ ID NO: 1388 - protein, 10 aa, artificial sequence
  CDR3 VH STE90-B2-C5
ARDVADAFDI

SEQ ID NO: 1389 - protein, 107 aa, artificial sequence
  VL STE90-B2-C5
DIVMTQSPSTLSASVGDRVTITCRASQSISSWLAWYQQKPGKAPKLLIYKASSLESGVPSRFSGSGSGTEFTLTISSLQPDDFATYYCQQYNSYPVTFGQGTKVEIK

SEQ ID NO: 1390 - protein, 6 aa, artificial sequence
  CDR1 VL STE90-B2-C5
QSISSW

SEQ ID NO: 1391 - protein, 3 aa, artificial sequence
  CDR2 VL STE90-B2-C5
KAS

SEQ ID NO: 1392 - protein, 9 aa, artificial sequence
  CDR3 VL STE90-B2-C5
QQYNSYPVT

SEQ ID NO: 1393 - protein, 116 aa, artificial sequence
  VH STE90-B2-D12
QVQLVESGGGLVQPGGSLRLSCAASGLTVSSNYMSWVRQAPGKGLEWVSVIYSGGSTYYADSAKGRFTISRDNSKNTLYLQMNSLRAEDTAVYYCARDVADAFDIWGQGTMVTVSS

SEQ ID NO: 1394 - protein, 8 aa, artificial sequence
  GLTVSSNY
GLTVSSNY

SEQ ID NO: 1395 - protein, 7 aa, artificial sequence
  CDR2 VH STE90-B2-D12
IYSGGST

SEQ ID NO: 1396 - protein, 10 aa, artificial sequence
  CDR3 VH STE90-B2-D12
ARDVADAFDI

SEQ ID NO: 1397 - protein, 108 aa, artificial sequence
  VL STE90-B2-D12
DIVMTQSPSFLSASVGDRVTITCRASQGISSYLAWYQQKPGKAPKLLIYAASTLQSGVPSRFSGSGSGTEFTLTISSLQPEDFATYYCQQLNSYPPYTFGQGTKLEIK

SEQ ID NO: 1398 - protein, 6 aa, artificial sequence
  CDR1 VL STE90-B2-D12
QGISSY

SEQ ID NO: 1399 - protein, 3 aa, artificial sequence
  CDR2 VL STE90-B2-D12
AAS

SEQ ID NO: 1400 - protein, 10 aa, artificial sequence
  CDR3 VL STE90-B2-D12
QQLNSYPPYT

SEQ ID NO: 1401 - protein, 116 aa, artificial sequence; identical to SEQ ID NO: 1329
  VH STE90-B2-E6

SEQ ID NO: 1402 - protein, 8 aa, artificial sequence
  CDR1 VH STE90-B2-E6
GLTVSSNY

SEQ ID NO: 1403 - protein, 7 aa, artificial sequence
  CDR2 VH STE90-B2-E6
IYSGGST

SEQ ID NO: 1404 - protein, 10 aa, artificial sequence
  CDR3 VH STE90-B2-E6
ARDVADAFDI

SEQ ID NO: 1405 - protein, 107 aa, artificial sequence
  VL STE90-B2-E6
AIRLTQSPSFLSASVGDRVTITCRASQGISSYLAWYQQKPGKAPKLLIYAASTLQSGVPSRFSGSGSGTEFTLTISSLQPEDFATYYCQQLNSYPPAFGPGTKVDIK

SEQ ID NO: 1406 - protein, 6 aa, artificial sequence
  CDR1 VL STE90-B2-E6
QGISSY

SEQ ID NO: 1407 - protein, 3 aa, artificial sequence
  CDR2 VL STE90-B2-E6
AAS

SEQ ID NO: 1408 - protein, 9 aa, artificial sequence
  CDR3 VL STE90-B2-E6
QQLNSYPPA

SEQ ID NO: 1409 - protein, 116 aa, artificial sequence
  VH STE90-B3-B10
EVQLVESGGGLVQPGGSLRLSCAASGLTVSSNYMSWVRQAPGKGLEWVSVIYSGGSTYYADSVKGRFTISRDNSKNTLYLQMNSLRAEDTAVYYCARDVADAFDVWGQGTMVTVSS

SEQ ID NO: 1410 - protein, 8 aa, artificial sequence
  CDR1 VH STE90-B3-B10
GLTVSSNY

SEQ ID NO: 1411 - protein, 7 aa, artificial sequence
  CDR2 VH STE90-B3-B10
IYSGGST

SEQ ID NO: 1412 - protein, 10 aa, artificial sequence
  CDR3 VH STE90-B3-B10
ARDVADAFDV

SEQ ID NO: 1413 - protein, 107 aa, artificial sequence
  VL STE90-B3-B10
DIVMTQSPSTLSASVGDRVTITCRASQSISSWVAWYQQKPGKAPKLLIYKASSLESGVPSRFSGSGSGTEFTLTISSLQPDDFATYYCQQYNSYPVTFGQGTKVEIK

SEQ ID NO: 1414 - protein, 6 aa, artificial sequence
  CDR1 VL STE90-B3-B10
QSISSW

SEQ ID NO: 1415 - protein, 3 aa, artificial sequence
  CDR2 VL STE90-B3-B10
KAS

SEQ ID NO: 1416 - protein, 9 aa, artificial sequence
  CDR3 VL STE90-B3-B10
QQYNSYPVT

SEQ ID NO: 1417 - protein, 116 aa, artificial sequence; identical to SEQ ID NO: 1321
  VH STE90-B3-H3

SEQ ID NO: 1418 - protein, 8 aa, artificial sequence
  CDR1 VH STE90-B3-H3
GLTVSSNY

SEQ ID NO: 1419 - protein, 7 aa, artificial sequence
  CDR2 VH STE90-B3-H3
IYSGGST

SEQ ID NO: 1420 - protein, 10 aa, artificial sequence
  CDR2 VH STE90-B3-H3
ARDVADAFDI

SEQ ID NO: 1421 - protein, 109 aa, artificial sequence
  VL STE90-B3-H3
DIVMTQSPSSVSASVGDRVTITCRASQGISSWLAWYQQKPGKAPKLLIYAASSLQSGVPSRFSGSGSGTDFTLTISSLQPEDFATYYCQQANSFPPLFTFGPGTKVDIK

SEQ ID NO: 1422 - protein, 6 aa, artificial sequence
  CDR1 VL STE90-B3-H3
QGISSW

SEQ ID NO: 1423 - protein, 3 aa, artificial sequence
  CDR2 VL STE90-B3-H3
AAS

SEQ ID NO: 1424 - protein, 11 aa, artificial sequence
  CDR3 VL STE90-B3-H3
QQANSFPPLFT

SEQ ID NO: 1425 - protein, 116 aa, artificial sequence
  VH STE90-B3-H6
QVQLVESGGGLVQPGGSLRLSCAASGLTVSSNYMSWVRQAPGKGLEWVSVIYSGGSTYYADSVKGRFTISRDNSKNTLHLQMNSLRAEDTAVYYCARDVADAFDIWGQGTMVTVSS

SEQ ID NO: 1426 - protein, 8 aa, artificial sequence
  CDR1 VH STE90-B3-H6
GLTVSSNY

SEQ ID NO: 1427 - protein, 7 aa, artificial sequence
  CDR1 VH STE90-B3-H6
IYSGGST

SEQ ID NO: 1428 - protein, 10 aa, artificial sequence
  CDR3 VH STE90-B3-H6
ARDVADAFDI

SEQ ID NO: 1429 - protein, 108 aa, artificial sequence
  VL STE90-B3-H6
AIRLTQSPSFLSASVGDRVTITCRASQGISSYLAWYQQKPGKAPKLLIYAASTLQSGVPSRFSGSGSGTEFTLTISSLQPEDFATYYCQQLNSYPPWTFGQGTKVEIK

SEQ ID NO: 1430 - protein, 6 aa, artificial sequence
  CDR1 VL STE90-B3-H6
QGISSY

SEQ ID NO: 1431 - protein, 3 aa, artificial sequence
  CDR2 VL STE90-B3-H6
AAS

SEQ ID NO: 1432 - protein, 10 aa, artificial sequence
  CDR3 VL STE90-B3-H6
QQLNSYPPWT

SEQ ID NO: 1433 - protein, 116 aa, artificial sequence; identical to SEQ ID NO: 1321
  VH STE91-C4

SEQ ID NO: 1434 - protein, 8 aa, artificial sequence
  CDR1 VH STE91-C4
GLTVSSNY

SEQ ID NO: 1435 - protein, 7 aa, artificial sequence
  CDR2 VH STE91-C4
IYSGGST

SEQ ID NO: 1436 - protein, 10 aa, artificial sequence
  CDR3 VH STE91-C4
ARDVADAFDI

SEQ ID NO: 1437 - protein, 108 aa, artificial sequence
  VL STE91-C4
QSVLTQPPSVSVAPGTTATITCAEDTIGSKSVHWYQQKAGQAPVLVIFYDSDRPSGIPKRFSGSNSGNTATLTISRVEAGDEADYFCQVWDSYTDAVVFGGGTKLTVL

SEQ ID NO: 1438 - protein, 6 aa, artificial sequence
  CDR1 VL STE91-C4
TIGSKS

SEQ ID NO: 1439 - protein, 3 aa, artificial sequence
  CDR2 VL STE91-C4
YDS

SEQ ID NO: 1440 - protein, 11 aa, artificial sequence
  CDR3 VL STE91-C4
QVWDSYTDAVV

SEQ ID NO: 1441 - protein, 116 aa, artificial sequence; identical to SEQ ID NO: 1329
  VH STE91-D4

SEQ ID NO: 1442 - protein, 8 aa, artificial sequence
  CDR1 VH STE91-D4
GLTVSSNY

SEQ ID NO: 1443 - protein, 7 aa, artificial sequence
  CDR2 VH STE91-D4
IYSGGST

SEQ ID NO: 1444 - protein, 10 aa, artificial sequence
  CDR3 VH STE91-D4
ARDVADAFDI

SEQ ID NO: 1445 - protein, 107 aa, artificial sequence
  VL STE91-D4
QAGLTQPPSVSVSPGQTASITCSGYKLGDKYVYWYQQKPGQSPVLVMYQDTKRPSGIPERFSGSNSGNTATLTISGTQAMDEADYYCQAWDSFAFYIFGTGTRVTVL

SEQ ID NO: 1446 - protein, 6 aa, artificial sequence
  CDR1 VL STE91-D4
KLGDKY

SEQ ID NO: 1447 - protein, 3 aa, artificial sequence
  CDR2 VL STE91-D4
QDT

SEQ ID NO: 1448 - protein, 10 aa, artificial sequence
  CDR3 VL STE91-D4
QAWDSFAFYI

SEQ ID NO: 1449 - protein, 116 aa, artificial sequence; identical to SEQ ID NO: 1321
  VH STE91-F6

SEQ ID NO: 1450 - protein, 8 aa, artificial sequence
  CDR1 VH STE91-F6
GLTVSSNY

SEQ ID NO: 1451 - protein, 7 aa, artificial sequence
  CDR2 VH STE91-F6
IYSGGST

SEQ ID NO: 1452 - protein, 10 aa, artificial sequence
  CDR3 VH STE91-F6
ARDVADAFDI

SEQ ID NO: 1453 - protein, 112 aa, artificial sequence
  VL STE91-F6
LPVLTQPPSVSGAPGQGVTISCTGSSSNIGAGYDVHWYQQLPGTAPKLLIYGNSNRPSGVPDRFSGSKSGTSASLAITGLQAEDEADYYCQSYDSSLSGSGVFGTGTKVTVL

SEQ ID NO: 1454 - protein, 9 aa, artificial sequence
  CDR1 VL STE91-F6
SSNIGAGYD

SEQ ID NO: 1455 - protein, 3 aa, artificial sequence
  CDR2 VL STE91-F6
GNS

SEQ ID NO: 1456 - protein, 12 aa, artificial sequence
  CDR3 VL STE91-F6
QSYDSSLSGSGV

SEQ ID NO: 1457 - protein, 116 aa, artificial sequence
  VH STE91-F10
QVQLVESGGGLVQPGGSLRLSCAASGLTVSSNYMGWVRQAPGKGLEWVSVIYSGGSTYYADSVKGRFTISRDNSKNTLYLQMNSLRAEDTAVYYCARDVADAFDIWGQGTMVTVSS

SEQ ID NO: 1458 - protein, 8 aa, artificial sequence
  CDR1 VH STE91-F10
GLTVSSNY

SEQ ID NO: 1459 - protein, 7 aa, artificial sequence
  CDR2 VH STE91-F10
IYSGGST

SEQ ID NO: 1460 - protein, 10 aa, artificial sequence
  CDR3 VH STE91-F10
ARDVADAFDI

SEQ ID NO: 1461 - protein, 107 aa, artificial sequence
  VL STE91-F10
QAGLTQPPSVSVSPGQIASITCSGYKLGDKYVYWYQQKPGQSPVLVMYQGTKRPSGIPERFSGSNSGNTATLTISGTQAMDEADYYCQAWDSFAFYVFGTGTRVTVL

SEQ ID NO: 1462 - protein, 6 aa, artificial sequence
  CDR1 VL STE91-F10
KLGDKY

SEQ ID NO: 1463 - protein, 3 aa, artificial sequence
  CDR2 VL STE91-F10
QGT

SEQ ID NO: 1464 - protein, 10 aa, artificial sequence
  CDR3 VL STE91-F10
QAWDSFAFYV

SEQ ID NO: 1465 - protein, 116 aa, artificial sequence
  VH STE91-B1-A10
QVQLVESGGGLVQPGGSLRLSCAASGLTVSSNYMSWVRQAPGKELEWVSVIYSGGSTYYADSVKGRFTISRDNSKNTLYLQMNSLRAEDTAVYYCARDVADAFDIWGQGTMVTVSS

SEQ ID NO: 1466 - protein, 8 aa, artificial sequence
  CDR1 VH STE91-B1-A10
GLTVSSNY

SEQ ID NO: 1467 - protein, 7 aa, artificial sequence
  CDR2 VH STE91-B1-A10
IYSGGST

SEQ ID NO: 1468 - protein, 10 aa, artificial sequence
  CDR3 VH STE91-B1-A10
ARDVADAFDI

SEQ ID NO: 1469 - protein, 107 aa, artificial sequence
  VL STE91-B1-A10
SYVLTQPPSVSVSPGQTASITCSGYKLGDKYVYWYQQKPGQSPVLVMYQDTKRPSGIPERFSGSNSGNTATLTISGTQAMDEADYYCQAWDSFAFYVFGTGTRVTVL

SEQ ID NO: 1470 - protein, 6 aa, artificial sequence
  CDR1 VL STE91-B1-A10
KLGDKY

SEQ ID NO: 1471 - protein, 3 aa, artificial sequence
  CDR2 VL STE91-B1-A10
QDT

SEQ ID NO: 1472 - protein, 10 aa, artificial sequence
  CDR3 VL STE91-B1-A10
QAWDSFAFYV

SEQ ID NO: 1473 - protein, 116 aa, artificial sequence; identical to SEQ ID NO: 1321
  VH STE91-B1-B3

SEQ ID NO: 1474 - protein, 8 aa, artificial sequence
  CDR1 VH STE91-B1-B3
GLTVSSNY

SEQ ID NO: 1475 - protein, 7 aa, artificial sequence
  CDR2 VH STE91-B1-B3
IYSGGST

SEQ ID NO: 1476 - protein, 10 aa, artificial sequence
  CDR3 VH STE91-B1-B3
ARDVADAFDI

SEQ ID NO: 1477 - protein, 108 aa, artificial sequence
  VL STE91-B1-B3
QAGLTQPPSVSVAPGQTARITCGGNNIGSKSVHWYQQKPGQAPVLVVYDDSDRPSGIPERFSGSNSGNTATLTISRVEAGDEADYYCQVWDSSSDHYVFGTGTKVTVL

SEQ ID NO: 1478 - protein, 6 aa, artificial sequence
  CDR1 VL STE91-B1-B3
NIGSKS

SEQ ID NO: 1479 - protein, 3 aa, artificial sequence
  CDR2 VL STE91-B1-B3
DDS

SEQ ID NO: 1480 - protein, 11 aa, artificial sequence
  CDR3 VL STE91-B1-B3
QVWDSSSDHYV

SEQ ID NO: 1481 - protein, 116 aa, artificial sequence
  VH STE94-A1
EVQLVQSGGGLVQPGGSLRLSCAASGLTVSSNYMSWVRQAPGKGLEWVSVIYSGGSTYYADSVKGRFTISRDDSKNTLYLQMNSLRAEDTAVYYCARDVADAFDIWGQGTMVTVSS

SEQ ID NO: 1482 - protein, 8 aa, artificial sequence
  CDR1 VH STE94-A1
GLTVSSNY

SEQ ID NO: 1483 - protein, 7 aa, artificial sequence
  CDR2 VH STE94-A1
IYSGGST

SEQ ID NO: 1484 - protein, 10 aa, artificial sequence
  CDR3 VH STE94-A1
ARDVADAFDI

SEQ ID NO: 1485 - protein, 111 aa, artificial sequence
  VL STE94-A1
SYELTQPPSVSGAPGQRVTISCTGSSSNIGAGYDVHWYQQLPGTAPKLLIYGNSNRPSGVPDRFSGSKSGTSASLAITGLQAEDEADYYCQSYDSSLSGLVFGGGTKLTVL

SEQ ID NO: 1486 - protein, 9 aa, artificial sequence
  CDR1 VL STE94-A1
SSNIGAGYD

SEQ ID NO: 1487 - protein, 3 aa, artificial sequence
  CDR2 VL STE94-A1
GNS

SEQ ID NO: 1488 - protein, 11 aa, artificial sequence
  CDR3 VL STE94-A1
QSYDSSLSGLV

SEQ ID NO: 1489 - protein, 116 aa, artificial sequence; identical to SEQ ID NO: 1321
  VH STE94-B2

SEQ ID NO: 1490 - protein, 8 aa, artificial sequence
  CDR1 VH STE94-B2
GLTVSSNY

SEQ ID NO: 1491 - protein, 7 aa, artificial sequence
  CDR2 VH STE94-B2
IYSGGST

SEQ ID NO: 1492 - protein, 10 aa, artificial sequence
  CDR3 VH STE94-B2
ARDVADAFDI

SEQ ID NO: 1493 - protein, 108 aa, artificial sequence
  VL STE94-B2
QSVLTQPPSVSVAPGKTARITCGGNNIGSKSVHWYQQKPGQAPVLVVYDDNDRPSRIPERFSGSDSGNTATLTISRVEAGDEADYYCQVWDSSSDHVVFGGGTKLTVL

SEQ ID NO: 1494 - protein, 6 aa, artificial sequence
  CDR1 VL STE94-B2
NIGSKS

SEQ ID NO: 1495 - protein, 3 aa, artificial sequence
  CDR2 VL STE94-B2
DDN

SEQ ID NO: 1496 - protein, 11 aa, artificial sequence
  CDR3 VL STE94-B2
QVWDSSSDHVV

SEQ ID NO: 1497 - protein, 116 aa, artificial sequence
  VH STE94-D3
QVQLQESGGGLVQPGGSLRLSCAASGLTVSSNYMSWVRQAPGKGLEWVSVIYSGGSTYYADSVKGRFTISRDNSKNTLYLQMNSLRAEDTAVYYCARDVADAFDIWGQGTMVTVSS

SEQ ID NO: 1498 - protein, 8 aa, artificial sequence
  CDR1 VH STE94-D3
GLTVSSNY

SEQ ID NO: 1499 - protein, 7 aa, artificial sequence
  CDR2 VH STE94-D3
IYSGGST

SEQ ID NO: 1500 - protein, 10 aa, artificial sequence
  CDR3 VH STE94-D3
ARDVADAFDI

SEQ ID NO: 1501 - protein, 111 aa, artificial sequence
  VL STE94-D3
QSALTQPASVSGSPGQSITISCTGTSNDVGAANYVFWYQQHPGKAPKLMIYGVSNRPSGVSDRFSGSKSGNTASLTISGLQAEDEADYYCSSYTSSGYLGVFGGGTKLTVL

SEQ ID NO: 1502 - protein, 9 aa, artificial sequence
  CDR1 VL STE94-D3
SNDVGAANY

SEQ ID NO: 1503 - protein, 3 aa, artificial sequence
  CDR2 VL STE94-D3
GVS

SEQ ID NO: 1504 - protein, 11 aa, artificial sequence
  CDR3 VL STE94-D3
SSYTSSGYLGV

SEQ ID NO: 1505 - protein, 116 aa, artificial sequence; identical to SEQ ID NO: 1497
  VH STE94-E3

SEQ ID NO: 1506 - protein, 8 aa, artificial sequence
  CDR1 VH STE94-E3
GLTVSSNY

SEQ ID NO: 1507 - protein, 7 aa, artificial sequence
  CDR2 VH STE94-E3
IYSGGST

SEQ ID NO: 1508 - protein, 10 aa, artificial sequence
  CDR3 VH STE94-E3
ARDVADAFDI

SEQ ID NO: 1509 - protein, 107 aa, artificial sequence
  VL STE94-E3
DIRLTQSPSFLSASVGDRVTITCRASQGISSYLAWYQQKPGKAPKLLIYAASTLQSGVPSRFSGSGSGTEFTLTISSLQPEDFATYYCQQLNSYPRSFGQGTKLEIK

SEQ ID NO: 1510 - protein, 6 aa, artificial sequence
  CDR1 VL STE94-E3
QGISSY

SEQ ID NO: 1511 - protein, 3 aa, artificial sequence
  CDR2 VL STE94-E3
AAS

SEQ ID NO: 1512 - protein, 9 aa, artificial sequence
  CDR3 VL STE94-E3
QQLNSYPRS

SEQ ID NO: 1513 - protein, 116 aa, artificial sequence
  VH STE94-E9
QVQLVQSGGGLVQPGGSLRLSCAASGLTVSSNYMSWVRQAPGKGLEWVSVIYSGGSTYYADSVKGRFTISRDNSKNTLYLQMNSLRAEDTAVYYCARDVADAFDIWGQGTMVTVSS

SEQ ID NO: 1514 - protein, 8 aa, artificial sequence
  CDR1 VH STE94-E9
GLTVSSNY

SEQ ID NO: 1515 - protein, 7 aa, artificial sequence
  CDR2 VH STE94-E9
IYSGGST

SEQ ID NO: 1516 - protein, 10 aa, artificial sequence
  CDR3 VH STE94-E9
ARDVADAFDI

SEQ ID NO: 1517 - protein, 109 aa, artificial sequence
  VL STE94-E9
QSVLTQPPSASGTPGQRVTISCSGSSSNIGSNYVYWYQQLPGTAPKLLIYRNNQRPSGVPDRFSGSKSGNTASLTVSGLQAEDEADYYCSSSAGSNNLLFGGGTKLTVL

SEQ ID NO: 1518 - protein, 8 aa, artificial sequence
  CDR1 VL STE94-E9
SSNIGSNY

SEQ ID NO: 1519 - protein, 3 aa, artificial sequence
  CDR2 VL STE94-E9
RNN

SEQ ID NO: 1520 - protein, 10 aa, artificial sequence
  CDR3 VL STE94-E9
SSSAGSNNLL

SEQ ID NO: 1521 - protein, 128 aa, artificial sequence
  VH STE94-F6
EVQLVQSGAEVKKPGSSVKVSCKASGGTFNNYAISWVRQAPGQGLEWMGRIIPILGIANYAQKFQGRVTITADKSTSTAYMELSSLRSEDTAVYYCATAVGDYYYDSSGYSPNWFDPWGQGTLVTVSS

SEQ ID NO: 1522 - protein, 8 aa, artificial sequence
  CDR1 VH STE94-F6
GGTFNNYA

SEQ ID NO: 1523 - protein, 8 aa, artificial sequence
  CDR2 VH STE94-F6
IIPILGIA

SEQ ID NO: 1524 - protein, 21 aa, artificial sequence
  CDR3 VH STE94-F6
ATAVGDYYYDSSGYSPNWFDP

SEQ ID NO: 1525 - protein, 107 aa, artificial sequence
  VL STE94-F6
DIVMTQSPSSLSASVGDRVTITCRASQSISSYLNWYQQKPGKAPKLLIYAASSLQSGVPSRFSGSGSGTDFTLTISSLQPEDFATYYCQQSYSTLYTFGQGTKLEIK

SEQ ID NO: 1526 - protein, 6 aa, artificial sequence
  CDR1 VL STE94-F6
QSISSY

SEQ ID NO: 1527 - protein, 3 aa, artificial sequence
  CDR2 VL STE94-F6
AAS

SEQ ID NO: 1528 - protein, 9 aa, artificial sequence
  CDR3 VL STE94-F6
QQSYSTLYT

SEQ ID NO: 1529 - protein, 116 aa, artificial sequence; identical to SEQ ID NO: 1313
  VH STE94-F7

SEQ ID NO: 1530 - protein, 8 aa, artificial sequence
  CDR1 VH STE94-F7
GLTVSSNY

SEQ ID NO: 1531 - protein, 7 aa, artificial sequence
  CDR2 VH STE94-F7
IYSGGST

SEQ ID NO: 1532 - protein, 10 aa, artificial sequence
  CDR3 VH STE94-F7
ARDVADAFDI

SEQ ID NO: 1533 - protein, 110 aa, artificial sequence
  VL STE94-F7
QAVLTQPPSASGTPGQRVTISCSGSSSNLGSNYVYWYQQLPGTAPKLLIYRNYQRPSGVPDRFSGSKSGTSASLAISGLRSEDEADYYCAAWDGSLSGVLFGGGTKLTVL

SEQ ID NO: 1534 - protein, 8 aa, artificial sequence
  CDR1 VL STE94-F7
SSNLGSNY

SEQ ID NO: 1535 - protein, 3 aa, artificial sequence
  CDR2 VL STE94-F7
RNY

SEQ ID NO: 1536 - protein, 11 aa, artificial sequence
  CDR3 VL STE94-F7
AAWDGSLSGVL

SEQ ID NO: 1537 - protein, 116 aa, artificial sequence
  VH STE94-F12
EVQLLESGGGVVQPGRSLRLSCAASGLTVSSNYMSWVRQAPGKGLEWVSVIYSGGSTYYADSVKGRFTISRDNSKNTLYLQMNSLRAEDTAVYYCARDVADAFDIWGQGTMVTVSS

SEQ ID NO: 1538 - protein, 8 aa, artificial sequence
  CDR1 VH STE94-F12
GLTVSSNY

SEQ ID NO: 1539 - protein, 7 aa, artificial sequence
  CDR2 VH STE94-F12
IYSGGST

SEQ ID NO: 1540 - protein, 10 aa, artificial sequence
  CDR3 VH STE94-F12
ARDVADAFDI

SEQ ID NO: 1541 - protein, 108 aa, artificial sequence
  VL STE94-F12
QAVLTQPPSVSVAPGKTARIICGGNNVGSTSVHWYQQKPGQAPVLVVYDNSDRPSGIPERFSGSTSGNTATLTISRAEAGDEADYHCQVWDSSSDHVVFGGGTKLTVL

SEQ ID NO: 1542 - protein, 7 aa, artificial sequence
  CDR1 VL STE94-F12
NNVGSTS

SEQ ID NO: 1543 - protein, 3 aa, artificial sequence
  CDR2 VL STE94-F12
DNS

SEQ ID NO: 1544 - protein, 11 aa, artificial sequence
  CDR3 VL STE94-F12
QVWDSSSDHVV

SEQ ID NO: 1545 - protein, 116 aa, artificial sequence; identical to SEQ ID NO: 1297
  VH STE94-H2

SEQ ID NO: 1546 - protein, 8 aa, artificial sequence
  CDR1 VH STE94-H2
GLTVSSNY

SEQ ID NO: 1547 - protein, 7 aa, artificial sequence
  CDR2 VH STE94-H2
IYSGGST

SEQ ID NO: 1548 - protein, 10 aa, artificial sequence
  CDR3 VH STE94-H2
ARDVADAFDI

SEQ ID NO: 1549 - protein, 108 aa, artificial sequence
  VL STE94-H2
DIRMTQSPSFLSASVGDRVTITCRASQGISSYLAWYQQKPGKAPKLLIYAASTLQSGVPSRFSGSGSGTEFTLTISSLQPEDFATYYCQQLNSYPPYTFGQGTKLEIK

SEQ ID NO: 1550 - protein, 6 aa, artificial sequence
  CDR1 VL STE94-H2
QGISSY

SEQ ID NO: 1551 - protein, 3 aa, artificial sequence
  CDR2 VL STE94-H2
AAS

SEQ ID NO: 1552 - protein, 10 aa, artificial sequence
  CDR3 VL STE94-H2
QQLNSYPPYT

SEQ ID NO: 1553 - protein, 116 aa, artificial sequence
  VH STE94-B1-D1
QVQLQESGGGLVQPGGSLRLSCVASGLTVSSNYMSWVRQAPGKGLEWVSVIYSGGSTYYADSVKGRFTISRDDSKNTLYLQMNSLRAEDTAVYYCARDVADAFDIWGQGTMVTVSS

SEQ ID NO: 1554 - protein, 8 aa, artificial sequence
  CDR1 VH STE94-B1-D1
GLTVSSNY

SEQ ID NO: 1555 - protein, 7 aa, artificial sequence
  CDR2 VH STE94-B1-D1
IYSGGST

SEQ ID NO: 1556 - protein, 10 aa, artificial sequence
  CDR3 VH STE94-B1-D1
ARDVADAFDI

SEQ ID NO: 1557 - protein, 108 aa, artificial sequence
  VL STE94-B1-D1
LPVLTQPPSVSVAPGKTASITCGGDYIGSKSVHWYRQKPGQAPVLVVYDDSEWPPGIPERFSGSNSGNTATLTISRVEPGDEADYYCQVWESGSDHYVFGSGTKVAVL

SEQ ID NO: 1558 - protein, 6 aa, artificial sequence
  CDR1 VL STE94-B1-D1
YIGSKS

SEQ ID NO: 1559 - protein, 3 aa, artificial sequence
  CDR2 VL STE94-B1-D1
DDS

SEQ ID NO: 1560 - protein, 11 aa, artificial sequence
  CDR3 VL STE94-B1-D1
QVWESGSDHYV

SEQ ID NO: 1561 - protein, 116 aa, artificial sequence; identical to SEQ ID NO: 1329
  VH STE94-B1-E12

SEQ ID NO: 1562 - protein, 8 aa, artificial sequence
  CDR1 VH STE94-B1-E12
GLTVSSNY

SEQ ID NO: 1563 - protein, 7 aa, artificial sequence
  CDR2 VH STE94-B1-E12
IYSGGST

SEQ ID NO: 1564 - protein, 10 aa, artificial sequence
  CDR3 VH STE94-B1-E12
ARDVADAFDI

SEQ ID NO: 1565 - protein, 108 aa, artificial sequence
  VL STE94-B1-E12
QAVLTQPPSVSVSPGQIAKITCSGDNLGDKNVGWYQQKPGQSPVLLIYQDLKRPSGIPERFSGSNSGSTATLTISGTQTMDEADYYCQAWDISTSTYVFGTGTKVTVL

SEQ ID NO: 1566 - protein, 6 aa, artificial sequence
  CDR1 VL STE94-B1-E12
NLGDKN

SEQ ID NO: 1567 - protein, 3 aa, artificial sequence
  CDR2 VL STE94-B1-E12
QDL

SEQ ID NO: 1568 - protein, 11 aa, artificial sequence
  CDR3 VL STE94-B1-E12
QAWDISTSTYV

SEQ ID NO: 1569 - protein, 116 aa, artificial sequence; identical to SEQ ID NO: 1497
  VH STE94-B2-B1

SEQ ID NO: 1570 - protein, 8 aa, artificial sequence
  CDR1 VH STE94-B2-B1
GLTVSSNY

SEQ ID NO: 1571 - protein, 7 aa, artificial sequence
  CDR2 VH STE94-B2-B1
IYSGGST

SEQ ID NO: 1572 - protein, 10 aa, artificial sequence
  CDR3 VH STE94-B2-B1
ARDVADAFDI

SEQ ID NO: 1573 - protein, 111 aa, artificial sequence
  VL STE94-B2-B1
QAVLTQPPSVSGAPGQRVTISCTGSSSNIGAGYDVHWYQQLPGTALKLLIYGNSNRPSGVPDRFSGSKSGTSASLAITGLQAEDEADYYCQSYDSSLSGVVFGGGTKLTVL

SEQ ID NO: 1574 - protein, 9 aa, artificial sequence
  CDR1 VL STE94-B2-B1
SSNIGAGYD

SEQ ID NO: 1575 - protein, 3 aa, artificial sequence
  CDR2 VL STE94-B2-B1
GNS

SEQ ID NO: 1576 - protein, 11 aa, artificial sequence
  CDR3 VL STE94-B2-B1
QSYDSSLSGVV

SEQ ID NO: 1577 - protein, 116 aa, artificial sequence; identical to SEQ ID NO: 1321
  VH STE94-B2-B6

SEQ ID NO: 1578 - protein, 8 aa, artificial sequence
  CDR1 VH STE94-B2-B6
GLTVSSNY

SEQ ID NO: 1579 - protein, 7 aa, artificial sequence
  CDR2 VH STE94-B2-B6
IYSGGST

SEQ ID NO: 1580 - protein, 10 aa, artificial sequence
  CDR3 VH STE94-B2-B6
ARDVADAFDI

SEQ ID NO: 1581 - protein, 108 aa, artificial sequence
  VL STE94-B2-B6
DVVLTQSPSSLSASVGDRVTITCRASQSISSYLNWYQQKPGKAPKLLIYAASSLQSGVPSRFSGSGSGTDFTLTISSLQPEDFATYYCQQSYSTPPHTFGQGTRLEIK

SEQ ID NO: 1582 - protein, 6 aa, artificial sequence
  CDR1 VL STE94-B2-B6
QSISSY

SEQ ID NO: 1583 - protein, 3 aa, artificial sequence
  CDR2 VL STE94-B2-B6
AAS

SEQ ID NO: 1584 - protein, 10 aa, artificial sequence
  CDR3 VL STE94-B2-B6
QQSYSTPPHT

SEQ ID NO: 1585 - protein, 116 aa, artificial sequence; identical to SEQ ID NO: 1321
  VH STE94-B2-E11

SEQ ID NO: 1586 - protein, 8 aa, artificial sequence
  CDR1 VH STE94-B2-E11
GLTVSSNY

SEQ ID NO: 1587 - protein, 7 aa, artificial sequence
  CDR2 VH STE94-B2-E11
IYSGGST

SEQ ID NO: 1588 - protein, 10 aa, artificial sequence
  CDR3 VH STE94-B2-E11
ARDVADAFDI

SEQ ID NO: 1589 - protein, 111 aa, artificial sequence
  VL STE94-B2-E11
QSVLTQPPSVSGAPGQRVTISCTGSSSNIGAGYDVHWYQQLPGTAPKLLIYDNNKRPSGIPDRFSGSKSGTSATLGITGLQTGDEATYYCGTWDSSLIGVVFGGGTKLTVL

SEQ ID NO: 1590 - protein, 9 aa, artificial sequence
  CDR1 VL STE94-B2-E11
SSNIGAGYD

SEQ ID NO: 1591 - protein, 3 aa, artificial sequence
  CDR2 VL STE94-B2-E11
DNN

SEQ ID NO: 1592 - protein, 11 aa, artificial sequence
  CDR3 VL STE94-B2-E11
GTWDSSLIGVV

SEQ ID NO: 1593 - protein, 120 aa, artificial sequence
  VH STE70-1E12
QMQLVQSGAEVKKPGASVKVSCKASGYTFTGYYMHWVRQAPGQGLEWMGRINPNSGGTNYAQKFQGRVTMTRDTSTSTAYMELSRLRSDDTAVYYCVRDGYNFNNWFDPWGQGTLVTVSS

SEQ ID NO: 1594 - protein, 8 aa, artificial sequence
  CDR1 VH STE70-1E12
GYTFTGYY

SEQ ID NO: 1595 - protein, 8 aa, artificial sequence
  CDR2 VH STE70-1E12
INPNSGGT

SEQ ID NO: 1596 - protein, 13 aa, artificial sequence
  CDR3 VH STE70-1E12
VRDGYNFNNWFDP

SEQ ID NO: 1597 - protein, 111 aa, artificial sequence
  VL STE70-1E12
NFMLTQPHSVSGSPGETITISCTGSGGSIASNYVQWYRQRPGSAPTIVIYEDTQRPSGVPDRFSGSIDSSSNSASLTISGLKTEDEADYYCQSSESTNHVMFGGGSKLTVL

SEQ ID NO: 1598 - protein, 8 aa, artificial sequence
  CDR1 VL STE70-1E12
GGSIASNY

SEQ ID NO: 1599 - protein, 3 aa, artificial sequence
  CDR2 VL STE70-1E12
EDT

SEQ ID NO: 1600 - protein, 10 aa, artificial sequence
  CDR3 VL STE70-1E12
QSSESTNHVM

SEQ ID NO: 1601 - protein, 123 aa, artificial sequence
  VH STE72-1B6
QVKLVQSGGGLVQPGGSLRLSCAASGFTFSSYAMSWVRQAPGKGLEWVSGISGSGGSTYYADSVKGRFTISRDNSKNTLYLQVNSLRAEDTAVYYCAKAPYGDFRGLWYFDYWGQGTLVTVSS

SEQ ID NO: 1602 - protein, 8 aa, artificial sequence
  CDR1 VH STE72-1B6
GFTFSSYA

SEQ ID NO: 1603 - protein, 8 aa, artificial sequence
  CDR2 VH STE72-1B6
ISGSGGST

SEQ ID NO: 1604 - protein, 16 aa, artificial sequence
  CDR2 VH STE72-1B6
AKAPYGDFRGLWYFDY

SEQ ID NO: 1605 - protein, 107 aa, artificial sequence
  VL STE72-1B6
DIVMTQSPFSVSASVGDRVTISCRASQDIRSWLAWYQQKPGKAPQLLIYDASSLQSGVPSRFSGSGSGTDFTLTISSLQPEDFATYYCQQADSVPLTFGGGTKVEIQ

SEQ ID NO: 1606 - protein, 6 aa, artificial sequence
  CDR1 VL STE72-1B6
QDIRSW

SEQ ID NO: 1607 - protein, 3 aa, artificial sequence
  CDR2 VL STE72-1B6
DAS

SEQ ID NO: 1608 - protein, 9 aa, artificial sequence
  CDR3 VL STE72-1B6
QQADSVPLT

SEQ ID NO: 1609 - protein, 118 aa, artificial sequence
  VH STE72-1G5
QVQLVQSGAEVKKPGASVKVSCKASGGTFSSYAISWVRQAPGQGLEWMGGIIPIFGTANYAQKFQGRVTITADESTSTAYMELSSLRSEDTAVYYCAVGGVQLWLTYWGQGTLVTVSS

SEQ ID NO: 1610 - protein, 8 aa, artificial sequence
  CDR1 VH STE72-1G5
GGTFSSYA

SEQ ID NO: 1611 - protein, 8 aa, artificial sequence
  CDR2 VH STE72-1G5
IIPIFGTA

SEQ ID NO: 1612 - protein, 11 aa, artificial sequence
  CDR3 VH STE72-1G5
AVGGVQLWLTY

SEQ ID NO: 1613 - protein, 107 aa, artificial sequence
  VL STE72-1G5
ETTLTQSPGALSLSPGERATLSCRVSQSLSSNSLAWYQQKPGQAPRLLIYDTSIRATGIPDRFSGSGSGTDFTLTISRLEPEDFAVYYCHKYGSWPRTFGQGTKVEV

SEQ ID NO: 1614 - protein, 7 aa, artificial sequence
  CDR1 VL STE72-1G5
QSLSSNS

SEQ ID NO: 1615 - protein, 3 aa, artificial sequence
  CDR2 VL STE72-1G5
DTS

SEQ ID NO: 1616 - protein, 9 aa, artificial sequence
  CDR3 VL STE72-1G5
HKYGSWPRT

SEQ ID NO: 1617 - protein, 123 aa, artificial sequence
  VH STE72-4C10
EVQLQESGGGVVQPGRSLRLSCAASGFTFSSYAMHWVRQAPGKGLEWVAVISYDGSNKYYADSVKGRFTISRDNSKNTLYLQMNSLRAEDTAVYYCAREYSSSWYGLGAFDIWGQGTMVTVSS

SEQ ID NO: 1618 - protein, 8 aa, artificial sequence
  CDR1 VH STE72-4C10
GFTFSSYA

SEQ ID NO: 1619 - protein, 8 aa, artificial sequence
  CDR2 VH STE72-4C10
ISYDGSNK

SEQ ID NO: 1620 - protein, 16 aa, artificial sequence
  CDR3 VH STE72-4C10
AREYSSSWYGLGAFDI

SEQ ID NO: 1621 - protein, 107 aa, artificial sequence
  VL STE72-4C10
DIRLTQSPSSLSASVGDRVTITCRASQNIHYYLNWYQQKPGKAPSLLVYGASSLQSGVPSRFSGSGSGTEYTLTISSLQPEDFATYFCQQSFKSPATFGQGTKVDIK

SEQ ID NO: 1622 - protein, 6 aa, artificial sequence
  CDR1 VL STE72-4C10
QNIHYY

SEQ ID NO: 1623 - protein, 3 aa, artificial sequence
  CDR2 VL STE72-4C10
GAS

SEQ ID NO: 1624 - protein, 9 aa, artificial sequence
  CDR3 VL STE72-4C10
QQSFKSPAT

SEQ ID NO: 1625 - protein, 117 aa, artificial sequence
  VH STE72-4E12
QVQLVQSGAEVKKPGASVKVSCKASGYTFTSYYMHWVRQAPGQGLEWMGIINPSGGSTSYAQKFQGRVTMTRDTSTSTVYMELSSLRSEDTAVYYCARDLSGGLDYWGQGTLVTVSS

SEQ ID NO: 1626 - protein, 8 aa, artificial sequence
  CDR1 VH STE72-4E12
GYTFTSYY

SEQ ID NO: 1627 - protein, 8 aa, artificial sequence
  CDR2 VH STE72-4E12
INPSGGST

SEQ ID NO: 1628 - protein, 10 aa, artificial sequence
  CDR3 VH STE72-4E12
ARDLSGGLDY

SEQ ID NO: 1629 - protein, 107 aa, artificial sequence
  VL STE72-4E12
ETTLTQSPATLSVSPGERVTLACRAGQTISSKLAWYRQKPGQAPSLLIYDASTRATGVPARFSGSGSGTEFTLTISSLQSEDFAVYYCQQYSDWPPTFGQGTKVEIK

SEQ ID NO: 1630 - protein, 6 aa, artificial sequence
  CDR1 VL STE72-4E12
QTISSK

SEQ ID NO: 1631 - protein, 3 aa, artificial sequence
  CDR2 VL STE72-4E12
DAS

SEQ ID NO: 1632 - protein, 9 aa, artificial sequence
  CDR3 VL STE72-4E12
QQYSDWPPT

SEQ ID NO: 1633 - protein, 121 aa, artificial sequence
  VH STE72-8A2
QVQLVQSGAEVKKPGASVKVSCKASGYTFTSYGISWVRQAPGQGLEWMGWISAYNGNTNYAQKLQGRVTMTTDTSTSTAYMELRSLRSDDTAVYYCARFFYDSSGYSTDYWGQGTLVTVSS

SEQ ID NO: 1634 - protein, 8 aa, artificial sequence
  CDR1 VH STE72-8A2
GYTFTSYG

SEQ ID NO: 1635 - protein, 8 aa, artificial sequence
  CDR2 VH STE72-8A2
ISAYNGNT

SEQ ID NO: 1636 - protein, 14 aa, artificial sequence
  CDR3 VH STE72-8A2
ARFFYDSSGYSTDY

SEQ ID NO: 1637 - protein, 107 aa, artificial sequence
  VL STE72-8A2
DIRLTQSPSSLSASVGDRVTITCQASQDISNYLNWYQQKPGKAPKLLIYDASNLETGVPSRFSGSGSGTDFTFTISSLQPEDIATYYCQQYDNLPRTFGGGTKVEIK

SEQ ID NO: 1638 - protein, 6 aa, artificial sequence
  CDR1 VL STE72-8A2
QDISNY

SEQ ID NO: 1639 - protein, 3 aa, artificial sequence
  CDR2 VL STE72-8A2
DAS

SEQ ID NO: 1640 - protein, 9 aa, artificial sequence
  CDR3 VL STE72-8A2
QQYDNLPRT

SEQ ID NO: 1641 - protein, 121 aa, artificial sequence; identical to SEQ ID NO: 1633
  VH STE72-8A6

SEQ ID NO: 1642 - protein, 8 aa, artificial sequence
  CDR1 VH STE72-8A6
GYTFTSYG

SEQ ID NO: 1643 - protein, 8 aa, artificial sequence
  CDR2 VH STE72-8A6
ISAYNGNT

SEQ ID NO: 1644 - protein, 14 aa, artificial sequence
  CDR3 VH STE72-8A6
ARFFYDSSGYSTDY

SEQ ID NO: 1645 - protein, 107 aa, artificial sequence
  VL STE72-8A6
DIVMTQSPSTLSASVGDRVTISCRASQNIGTWLAWYQQKPGKAPKLLISKASSLESGVPSRFSGSGSGTDFTLTISSLQPDDFATYYCQQYDSYLFTFGQGTKLEIR

SEQ ID NO: 1646 - protein, 6 aa, artificial sequence
  CDR1 VL STE72-8A6
QNIGTW

SEQ ID NO: 1647 - protein, 3 aa, artificial sequence
  CDR2 VL STE72-8A6
KAS

SEQ ID NO: 1648 - protein, 9 aa, artificial sequence
  CDR3 VL STE72-8A6
QQYDSYLFT

SEQ ID NO: 1649 - protein, 122 aa, artificial sequence
  VH STE72-8E1
QVQLQEWGPGLVQPSETLSLTCTVSGGSISSGGYYWSWIRQHPGKGLEWIGRIYPSGSTNYNPSLKSRVTMSVDTSENQFSLKLSSVTAADTAVYYCARGGPKRSGSPFDVWGQGTMVTVSS

SEQ ID NO: 1650 - protein, 10 aa, artificial sequence
  CDR1 VH STE72-8E1
GGSISSGGYY

SEQ ID NO: 1651 - protein, 7 aa, artificial sequence
  CDR2 VH STE72-8E1
IYPSGST

SEQ ID NO: 1652 - protein, 14 aa, artificial sequence
  CDR3 VH STE72-8E1
ARGGPKRSGSPFDV

SEQ ID NO: 1653 - protein, 108 aa, artificial sequence
  VL STE72-8E1
EVVMTQSPSTLSASVGDRVTITCRASQTFGPWLAWYQQKPGQAPKLLIYMASELESGVPSRFSGSGSGTEFTLSISSLQPDDFATYYCQQYNTFSPWTFGQGTKVDIK

SEQ ID NO: 1654 - protein, 6 aa, artificial sequence
  CDR1 VL STE72-8E1
QTFGPW

SEQ ID NO: 1655 - protein, 3 aa, artificial sequence
  CDR2 VL STE72-8E1
MAS

SEQ ID NO: 1656 - protein, 10 aa, artificial sequence
  CDR3 VL STE72-8E1
QQYNTFSPWT

SEQ ID NO: 1657 - protein, 121 aa, artificial sequence; identical to SEQ ID NO: 1633
  VH STE72-2G4

SEQ ID NO: 1658 - protein, 8 aa, artificial sequence
  CDR1 VH STE72-2G4
GYTFTSYG

SEQ ID NO: 1659 - protein, 8 aa, artificial sequence
  CDR2 VH STE72-2G4
ISAYNGNT

SEQ ID NO: 1660 - protein, 14 aa, artificial sequence
  CDR3 VH STE72-2G4
ARFFYDSSGYSTDY

SEQ ID NO: 1661 - protein, 109 aa, artificial sequence
  VL STE72-2G4
ETTLTQSPAFMSVTPGDRAILSCRASQSVDSHLAWYHQKPGQPPRLLIYGASTRATGIPARFSGSRSGTEFTLTISGLQSEDLGVYYCQQYASWPPGYNFGQGTKLEIK

SEQ ID NO: 1662 - protein, 6 aa, artificial sequence
  CDR1 VL STE72-2G4
QSVDSH

SEQ ID NO: 1663 - protein, 3 aa, artificial sequence
  CDR2 VL STE72-2G4
GAS

SEQ ID NO: 1664 - protein, 11 aa, artificial sequence
  CDR3 VL STE72-2G4
QQYASWPPGYN

SEQ ID NO: 1665 - protein, 120 aa, artificial sequence
  VH STE73-2B2
QVQLVQSGAEVKKPGASVKVSCKASGYTFTGYYMHWVRQAPGQGLEWMGWINPNSGGTNYAQKFQGRVTITRDTSASTAYMELSSLRSEDTAVYYCARVSGWYFGAFDIWGQGTMVTVSS

SEQ ID NO: 1666 - protein, 8 aa, artificial sequence
  CDR1 VH STE73-2B2
GYTFTGYY

SEQ ID NO: 1667 - protein, 8 aa, artificial sequence
  CDR2 VH STE73-2B2
INPNSGGT

SEQ ID NO: 1668 - protein, 13 aa, artificial sequence
  CDR3 VH STE73-2B2
ARVSGWYFGAFDI

SEQ ID NO: 1669 - protein, 112 aa, artificial sequence
  VL STE73-2B2
LPVLTQPHSLSESPGKTVNISCTGSSGSIASNYVQWYQQRPGSAPTTVIYEDSHRPSGVPDRFSGSIDSSSNSASLSISGLKTEDEADYYCQSYDSSNNQWVFGGGTKLTVL

SEQ ID NO: 1670 - protein, 8 aa, artificial sequence
  CDR1 VL STE73-2B2
SGSIASNY

SEQ ID NO: 1671 - protein, 3 aa, artificial sequence
  CDR2 VL STE73-2B2
EDS

SEQ ID NO: 1672 - protein, 11 aa, artificial sequence
  CDR3 VL STE73-2B2
QSYDSSNNQWV

SEQ ID NO: 1673 - protein, 115 aa, artificial sequence
  VH STE73-2C2
QVQLVESGGGLVQPGGSLRLSCAASGITVSSNYMSWVRQAPGKGLEWVSVIYSGGSTFYADSVKGRFTISRDNSKNTLYLQMNSLRAEDTGVYYCARGHDNLDYWGQGTLVTVSS

SEQ ID NO: 1674 - protein, 8 aa, artificial sequence
  CDR1 VH STE73-2C2
GITVSSNY

SEQ ID NO: 1675 - protein, 7 aa, artificial sequence
  CDR2 VH STE73-2C2
IYSGGST

SEQ ID NO: 1676 - protein, 9 aa, artificial sequence
  CDR3 VH STE73-2C2
ARGHDNLDY

SEQ ID NO: 1677 - protein, 111 aa, artificial sequence
  VL STE73-2C2
LPVLTQPHSVSESPGKTVIISCTGSSDSIASNYVQWYQQRPGSAPTTVIYEDNKRPSGVPDRFSGSTDSSSNSASLTISGLKTEDEAEYYCQSYDSNNHWVFGGGTKLTVL

SEQ ID NO: 1678 - protein, 8 aa, artificial sequence
  CDR1 VL STE73-2C2
SDSIASNY

SEQ ID NO: 1679 - protein, 3 aa, artificial sequence
  CDR2 VL STE73-2C2
EDN

SEQ ID NO: 1680 - protein, 10 aa, artificial sequence
  CDR3 VL STE73-2C2
QSYDSNNHWV

SEQ ID NO: 1681 - protein, 114 aa, artificial sequence
  VH STE73-2E9
QVQLVQSGAEVKKPGASVKVSCKASGYTFTSYGISWVRQAPGQGLEWMGWISAYNGNTNYAQKLQGRVTMTTDTSTSTAYMELRSLRSDDTAVYYCARGKFDYWGQGTLVTVSS

SEQ ID NO: 1682 - protein, 8 aa, artificial sequence
  CDR1 VH STE73-2E9
GYTFTSYG

SEQ ID NO: 1683 - protein, 8 aa, artificial sequence
  CDR2 VH STE73-2E9
ISAYNGNT

SEQ ID NO: 1684 - protein, 7 aa, artificial sequence
  CDR3 VH STE73-2E9
ARGKFDY

SEQ ID NO: 1685 - protein, 110 aa, artificial sequence
  VL STE73-2E9
QSVLTQPPSVSEAPSQRVTISCSGSSSNIGNNAVNWYQQLPGKAPKLLIYYDDVLPSGVSDRFSGSKSGTSASLAISGLQSGDEADYYCAAWDDSLSGVVFGGGTKLTVL

SEQ ID NO: 1686 - protein, 8 aa, artificial sequence
  CDR1 VL STE73-2E9
SSNIGNNA

SEQ ID NO: 1687 - protein, 3 aa, artificial sequence
  CDR2 VL STE73-2E9
YDD

SEQ ID NO: 1688 - protein, 11 aa, artificial sequence
  CDR3 VL STE73-2E9
AAWDDSLSGVV

SEQ ID NO: 1689 - protein, 116 aa, artificial sequence
  VH STE73-2G8
QVQLVQSGGGLVKPGGSLRLSCAASGITVSSNYMSWVRQAPGKGLEWVSILYSGGTTFYTDSVKGRFTISRDNSKNTLHLQMNSLRAEDTAVYYCARWSGTYYDYWGQGTLVTVSS

SEQ ID NO: 1690 - protein, 8 aa, artificial sequence
  CDR1 VH STE73-2G8
GITVSSNY

SEQ ID NO: 1691 - protein, 7 aa, artificial sequence
  CDR2 VH STE73-2G8
LYSGGTT

SEQ ID NO: 1692 - protein, 10 aa, artificial sequence
  CDR3 VH STE73-2G8
ARWSGTYYDY

SEQ ID NO: 1693 - protein, 108 aa, artificial sequence
  VL STE73-2G8
SSELTQDPAVSVALGQTVRITCQGDSLRSYYASWYQQKPGQAPVLVIYGKNNRPSGIPDRFSGSSSGNTASLTITGAQAEDEADYYCNSRDSTNDPVLFGAGTKLTVL

SEQ ID NO: 1694 - protein, 6 aa, artificial sequence
  CDR1 VL STE73-2G8
SLRSYY

SEQ ID NO: 1695 - protein, 3 aa, artificial sequence
  CDR2 VL STE73-2G8
GKN

SEQ ID NO: 1696 - protein, 11 aa, artificial sequence
  CDR3 VL STE73-2G8
NSRDSTNDPVL

SEQ ID NO: 1697 - protein, 127 aa, artificial sequence
  VH STE73-6B10
QVQLVQSGAEVKKPGASVKVSCKASGYTFTSYGISWVRQAPGQGLEWMGWINPNSGGTNYAQKFQGRVTMTRDTSISTAYMELSRLRSDDTAVYYCARDRLRYGDSGSYYYYGMDVWGQGTTVTVSS

SEQ ID NO: 1698 - protein, 8 aa, artificial sequence
  CDR1 VH STE73-6B10
GYTFTSYG

SEQ ID NO: 1699 - protein, 8 aa, artificial sequence
  CDR2 VH STE73-6B10
INPNSGGT

SEQ ID NO: 1700 - protein, 20 aa, artificial sequence
  CDR3 VH STE73-6B10
ARDRLRYGDSGSYYYYGMDV

SEQ ID NO: 1701 - protein, 110 aa, artificial sequence
  VL STE73-6B10
QSALTQPRSVSGSPGQSVTISCTGTSSDVGGYNYVSWYQQHPGKAPKLLISEVTRRPSGVPDRFSGSKSGNTASLTVSGLQTEDEADYYCGSYAGSNTWVFGGGTKLTVL

SEQ ID NO: 1702 - protein, 9 aa, artificial sequence
  CDR1 VL STE73-6B10
SSDVGGYNY

SEQ ID NO: 1703 - protein, 3 aa, artificial sequence
  CDR2 VL STE73-6B10
EVT

SEQ ID NO: 1704 - protein, 10 aa, artificial sequence
  CDR3 VL STE73-6B10
GSYAGSNTWV

SEQ ID NO: 1705 - protein, 117 aa, artificial sequence
  VH STE73-6C1
QVQLVQSGGGVVQPGRSLRLSCAASGFTFSSYAMHWVRQAPGKGLEWVAVISYDGSNKYYADSVKGRFTISRDNSKNTLYLQMNSLRAEDTAVYYCARSYVGGMDVWGQGTTVTVSS

SEQ ID NO: 1706 - protein, 8 aa, artificial sequence
  CDR1 VH STE73-6C1
GFTFSSYA

SEQ ID NO: 1707 - protein, 8 aa, artificial sequence
  CDR2 VH STE73-6C1
ISYDGSNK

SEQ ID NO: 1708 - protein, 10 aa, artificial sequence
  CDR3 VH STE73-6C1
ARSYVGGMDV

SEQ ID NO: 1709 - protein, 111 aa, artificial sequence
  VL STE73-6C1
QLVLTQSPSVSGAPGQSVTISCTGTDSNIGAGYNVHWYQQLPGAAPKLIISYTDNRPSGVPDRFSGSKSGTSASLAITGLQAEDEADYYCQSSDRTLVGSLFGTGTKVTVL

SEQ ID NO: 1710 - protein, 9 aa, artificial sequence
  CDR1 VL STE73-6C1
DSNIGAGYN

SEQ ID NO: 1711 - protein, 3 aa, artificial sequence
  CDR2 VL STE73-6C1
YTD

SEQ ID NO: 1712 - protein, 11 aa, artificial sequence
  CDR3 VL STE73-6C1
QSSDRTLVGSL

SEQ ID NO: 1713 - protein, 119 aa, artificial sequence
  VH STE73-6C8
QVQLQQSGAEVKKPGSSVKVSCKASGGTFSSYAISWVRQAPGQGLEWMGRIIPILGIANYAQKFQGRVTITADKSTSTAYMELSSLRSEDTAVYYCARSIAALNWFDPWGQGTLVTVSS

SEQ ID NO: 1714 - protein, 8 aa, artificial sequence
  CDR1 VH STE73-6C8
GGTFSSYA

SEQ ID NO: 1715 - protein, 8 aa, artificial sequence
  CDR2 VH STE73-6C8
IIPILGIA

SEQ ID NO: 1716 - protein, 12 aa, artificial sequence
  CDR3 VH STE73-6C8
ARSIAALNWFDP

SEQ ID NO: 1717 - protein, 110 aa, artificial sequence
  VL STE73-6C8
NFMLTQPHSVSESPGKTVTIPCTGSRGSIANNYVQWYRQRPGRAPTTVIFEDNQRPSGVPDRFSGSIDRSSNSASLTISGLETEDEADYYCQSYDGSNVIFGGGTKLTVL

SEQ ID NO: 1718 - protein, 8 aa, artificial sequence
  CDR1 VL STE73-6C8
RGSIANNY

SEQ ID NO: 1719 - protein, 3 aa, artificial sequence
  CDR2 VL STE73-6C8
EDN

SEQ ID NO: 1720 - protein, 9 aa, artificial sequence
  CDR3 VL STE73-6C8
QSYDGSNVI

SEQ ID NO: 1721 - protein, 120 aa, artificial sequence
  VH STE73-9G3
QVQLQESGGGLVQPGGSLRLSCAASGFTFSSYAMSWVRQAPGKGLEWVSAISGSGGSTYYADSVKGRFTISRDNSKNTLYLQMNSLRAEDTAVYYCARDLVLGSGSSNDWGRGTLVTVSS

SEQ ID NO: 1722 - protein, 8 aa, artificial sequence
  CDR1 VH STE73-9G3
GFTFSSYA

SEQ ID NO: 1723 - protein, 8 aa, artificial sequence
  CDR2 VH STE73-9G3
ISGSGGST

SEQ ID NO: 1724 - protein, 13 aa, artificial sequence
  CDR3 VH STE73-9G3
ARDLVLGSGSSND

SEQ ID NO: 1725 - protein, 111 aa, artificial sequence
  VL STE73-9G3
QPVLTQPPSVSGAPGQSVTISCTGTDSNIGAGYNVHWYQQLPGAAPKLIISYTDNRPSGVPDRFSGSKSGTSASLAITGLQAEDEADYYCQSSDRTLVGSLFGTGTKVTVL

SEQ ID NO: 1726 - protein, 9 aa, artificial sequence
  CDR1 VL STE73-9G3
DSNIGAGYN

SEQ ID NO: 1727 - protein, 3 aa, artificial sequence
  CDR2 VL STE73-9G3
YTD

SEQ ID NO: 1728 - protein, 11 aa, artificial sequence
  CDR3 VL STE73-9G3
QSSDRTLVGSL

SEQ ID NO: 1729 - DNA, 669 bp, artificial sequence
  SARS-CoV-2 RBD 7PM Mutant
cgggtgcagcccaccgaatccatcgtgcggttccccaatatcaccaatctgtgccccttcggcgaggtgttcaatgccaccagattcgcctctgtgtacgcctggaaccggaagcggatcagcaattgcgtggccgactactccttcctgtacaactccgccagcttcagcaccttcaagtgctacggcgtgtcccctaccaagctgaacgacctgtgcttcacaaacgtgtacgccgacagcttcgtgatccggggagatgaagtgcggcagattgcccctggacagacaggcaagatcgccgactacaactacaagctgcccgacgacttcaccggctgtgtgattgcctggaacagcaagaacctggactccaaagtcggcggcaactacaattacctgtaccggctgttccggaagtccaatctgaagcccttcgagcgggacatctccaccgagatctatcaggccagcagcaccccttgtaacggcgcgaaacgcgtcaactgctacttcccactgcagtcctacggctttcagcccacaaatggcgtgggctaccagccttacagagtggtggtgctgagcttcgagctgctgcatgctcctgccacagtgtgcggccctaagaaaagcaccaatctcgtgaagaacaaatgcgtgaacttc

SEQ ID NO: 1730 - protein, 223 aa, artificial sequence
  SARS-CoV-2 RBD 7PM Mutant
RVQPTESIVRFPNITNLCPFGEVFNATRFASVYAWNRKRISNCVADYSFLYNSASFSTFKCYGVSPTKLNDLCFTNVYADSFVIRGDEVRQIAPGQTGKIADYNYKLPDDFTGCVIAWNSKNLDSKVGGNYNYLYRLFRKSNLKPFERDISTEIYQASSTPCNGAKRVNCYFPLQSYGFQPTNGVGYQPYRVVVLSFELLHAPATVCGPKKSTNLVKNKCVNF

SEQ ID NO: 1731 - DNA, 15 bp, Artificial Sequence
  REGN10933 HCDR1 DNA
gactactacatgagc

SEQ ID NO: 1732 - protein, 5 aa, Artificial Sequence
  REGN10933 HCDR1 PRT
DYYMS

SEQ ID NO: 1733 - DNA, 51 bp, Artificial Sequence
  REGN10933 HCDR2 DNA
tacattacttatagtggtagtaccatatactacgcagactctgtgaagggc

SEQ ID NO: 1734 - protein, 16 aa, Artificial Sequence
  REGN10933 HCDR2 PRT
YITYSGSTIYYADSVK

SEQ ID NO: 1735 - DNA, 33 bp, Artificial Sequence
  REGN10933 HCDR3 DNA
gatcgcggtacaactatggtcccctttgactac

SEQ ID NO: 1736 - protein, 11 aa, Artificial Sequence
  REGN10933 HCDR3 PRT
DRGTTMVPFDY

SEQ ID NO: 1737 - DNA, 33 bp, Artificial Sequence
  REGN10933 LCDR1 DNA
caggcgagtcaggacattaccaactatttaaat

SEQ ID NO: 1738 - protein, 11 aa, Artificial Sequence
  REGN10933 LCDR1 PRT
QASQDITNYLN

SEQ ID NO: 1739 - DNA, 21 bp, Artificial Sequence
  REGN10933 LCDR2 DNA
gctgcatccaatttggaaaca

SEQ ID NO: 1740 - protein, 7 aa, Artificial Sequence
  REGN10933 LCDR2 PRT
AASNLET

SEQ ID NO: 1741 - DNA, 27 bp, Artificial Sequence
  REGN10933 LCDR3 DNA
caacagtatgataatctccctctcact

SEQ ID NO: 1742 - protein, 9 aa, Artificial Sequence
  REGN10933 LCDR3 PRT
QQYDNLPLT

SEQ ID NO: 1743 - DNA, 321 bp, Artificial Sequence
  REGN10933 VL DNA
gacatccagatgacccagtctccatcctccctgtctgcatctgtaggagacagagtcaccatcacttgccaggcgagtcaggacattaccaactatttaaattggtatcagcagaaaccagggaaagcccctaagctcctgatctacgctgcatccaatttggaaacaggggtcccatcaaggttcagtggaagtggatctgggacagattttactttcaccatcagcggcctgcagcctgaagatattgcaacatattactgtcaacagtatgataatctccctctcactttcggcggagggaccaaggtggagatcaaa

SEQ ID NO: 1744 - protein, 107 aa, Artificial Sequence
  REGN10933 VL PRT
DIQMTQSPSSLSASVGDRVTITCQASQDITNYLNWYQQKPGKAPKLLIYAASNLETGVPSRFSGSGSGTDFTFTISGLQPEDIATYYCQQYDNLPLTFGGGTKVEIK

SEQ ID NO: 1745 - DNA, 360 bp, Artificial Sequence
  REGN10933 VH DNA
caggtgcagctggtggagtctgggggaggcttggtcaagcctggagggtccctgagactctcctgtgcagcctctggattcaccttcagtgactactacatgagctggatccgccaggctccagggaaggggctggagtgggtttcatacattacttatagtggtagtaccatatactacgcagactctgtgaagggccgattcaccatctccagggacaacgccaagagctcactgtatctgcaaatgaacagcctgagagccgaggacacggccgtgtattactgtgcgagagatcgcggtacaactatggtcccctttgactactggggccagggaaccctggtcaccgtgtcctca

SEQ ID NO: 1746 - protein, 120 aa, Artificial Sequence
  REGN10933 VH PRT
QVQLVESGGGLVKPGGSLRLSCAASGFTFSDYYMSWIRQAPGKGLEWVSYITYSGSTIYYADSVKGRFTISRDNAKSSLYLQMNSLRAEDTAVYYCARDRGTTMVPFDYWGQGTLVTVSS

SEQ ID NO: 1747 - DNA, 1344 bp, Artificial Sequence
  REGN10933 VH complete DNA
caggtgcagctggtggagtctgggggaggcttggtcaagcctggagggtccctgagactctcctgtgcagcctctggattcaccttcagtgactactacatgagctggatccgccaggctccagggaaggggctggagtgggtttcatacattacttatagtggtagtaccatatactacgcagactctgtgaagggccgattcaccatctccagggacaacgccaagagctcactgtatctgcaaatgaacagcctgagagccgaggacacggccgtgtattactgtgcgagagatcgcggtacaactatggtcccctttgactactggggccagggaaccctggtcaccgtgtcctcagctagcaccaagggcccatcggtcttccccctggcaccctcctccaagagcacctctgggggcacagcggccctgggctgcctggtcaaggactacttccccgaaccggtgacggtgtcgtggaactcaggcgccctgaccagcggcgtgcacaccttcccggctgtcctacagtcctcaggactctactccctcagcagcgtggtgaccgtgccctccagcagcttgggcacccagacctacatctgcaacgtgaatcacaagcccagcaacaccaaggtggacaagaaagttgagcccaaatcttgtgacaaaactcacacatgcccaccgtgcccagcacctccagtggccggaccgtcagtcttcctcttccccccaaaacccaaggacaccctcatgatctcccggacccctgaggtcacatgcgtggtggtgggcgtgagccacgaagaccctgaggtcaagttcaactggtacgtggacggcgtggaggtgcataatgccaagacaaagccgcgggaggagcagtacaacagcacgtaccgggtggtcagcgtcctcaccgtcctgcaccaggactggctgaatggcaaggagtacaagtgcaaggtctccaacaaacagctcccatcccccatcgagaaaaccatctccaaagccaaagggcagccccgagaaccacaggtgtacaccctgcccccatcccgggatgagctgaccaagaaccaggtcagcctgacctgcctggtcaaaggcttctatcccagcgacatcgccgtggagtgggagagcaatgggcagccggagaacaactacaagaccacgcctcccgtgctggactccgacggctccttcttcctctacagcaagctcaccgtggacaagagcaggtggcagcaggggaacgtcttctcatgctccgtgatgcatgaggctctgcacaaccactacacgcagaaaagcctctccctgtccccgggt

SEQ ID NO: 1748 - protein, 448 aa, Artificial Sequence
  REGN10933 VH complete PRT
QVQLVESGGGLVKPGGSLRLSCAASGFTFSDYYMSWIRQAPGKGLEWVSYITYSGSTIYYADSVKGRFTISRDNAKSSLYLQMNSLRAEDTAVYYCARDRGTTMVPFDYWGQGTLVTVSSASTKGPSVFPLAPSSKSTSGGTAALGCLVKDYFPEPVTVSWNSGALTSGVHTFPAVLQSSGLYSLSSVVTVPSSSLGTQTYICNVNHKPSNTKVDKKVEPKSCDKTHTCPPCPAPPVAGPSVFLFPPKPKDTLMISRTPEVTCVVVGVSHEDPEVKFNWYVDGVEVHNAKTKPREEQYNSTYRVVSVLTVLHQDWLNGKEYKCKVSNKQLPSPIEKTISKAKGQPREPQVYTLPPSRDELTKNQVSLTCLVKGFYPSDIAVEWESNGQPENNYKTTPPVLDSDGSFFLYSKLTVDKSRWQQGNVFSCSVMHEALHNHYTQKSLSLSPG

SEQ ID NO: 1749 - DNA, 642 bp, Artificial Sequence
  REGN10933 VL complete DNA
gacatccagatgacccagtctccatcctccctgtctgcatctgtaggagacagagtcaccatcacttgccaggcgagtcaggacattaccaactatttaaattggtatcagcagaaaccagggaaagcccctaagctcctgatctacgctgcatccaatttggaaacaggggtcccatcaaggttcagtggaagtggatctgggacagattttactttcaccatcagcggcctgcagcctgaagatattgcaacatattactgtcaacagtatgataatctccctctcactttcggcggagggaccaaggtggagatcaaacgtacggtggctgcaccatctgtgttcatcttcccgccatctgatgagcagttgaaatctggaactgcctctgttgtgtgcctgctgaataacttctatcccagagaggccaaagtacagtggaaggtggataacgccctccaatcgggtaactcccaggagagtgtcacagagcaggacagcaaggacagcacctacagcctcagcagcaccctgacgctgagcaaagcagactacgagaaacacaaagtctacgcctgcgaagtcacccatcagggcctgagctcgcccgtcacaaagagcttcaacaggggagagtgt

SEQ ID NO: 1750 - protein, 214 aa, Artificial Sequence
  REGN10933 VL complete PRT
DIQMTQSPSSLSASVGDRVTITCQASQDITNYLNWYQQKPGKAPKLLIYAASNLETGVPSRFSGSGSGTDFTFTISGLQPEDIATYYCQQYDNLPLTFGGGTKVEIKRTVAAPSVFIFPPSDEQLKSGTASVVCLLNNFYPREAKVQWKVDNALQSGNSQESVTEQDSKDSTYSLSSTLTLSKADYEKHKVYACEVTHQGLSSPVTKSFNRGEC

SEQ ID NO: 1751 - DNA, 15 bp, Artificial Sequence
  REGN10987 HCDR1 DNA
aactatgctatgtac

SEQ ID NO: 1752 - protein, 5 aa, Artificial Sequence
  REGN10987 HCDR1 PRT
NYAMY

SEQ ID NO: 1753 - DNA, 51 bp, Artificial Sequence
  REGN10987 HCDR2 DNA
gttatatcatatgatggaagtaataaatactatgcagactccgtgaagggc

SEQ ID NO: 1754 - protein, 16 aa, Artificial Sequence
  REGN10987 HCDR2 PRT
VISYDGSNKYYADSVK

SEQ ID NO: 1755 - DNA, 33 bp, Artificial Sequence
  REGN10987 HCDR3 DNA
ggctccgactacggtgactacttattggtttac

SEQ ID NO: 1756 - protein, 11 aa, Artificial Sequence
  REGN10987 HCDR3 PRT
GSDYGDYLLVY

SEQ ID NO: 1757 - DNA, 42 bp, Artificial Sequence; identical to SEQ ID NO: 35
  REGN10987 LCDR1 DNA

SEQ ID NO: 1758 - protein, 14 aa, Artificial Sequence
  REGN10987 LCDR1 PRT
TGTSSDVGGYNYVS

SEQ ID NO: 1759 - DNA, 21 bp, Artificial Sequence
  REGN10987 LCDR2 DNA
gatgtcagtaagcggccctca

SEQ ID NO: 1760 - protein, 7 aa, Artificial Sequence
  REGN10987 LCDR2 PRT
DVSKRPS

SEQ ID NO: 1761 - DNA, 30 bp, Artificial Sequence
  REGN10987 LCDR3 DNA
aactctttgacaagcatcagcacttgggtg

SEQ ID NO: 1762 - protein, 10 aa, Artificial Sequence
  REGN10987 LCDR3 PRT
NSLTSISTWV

SEQ ID NO: 1763 - DNA, 330 bp, Artificial Sequence
  REGN10987 VL DNA
cagtctgccctgactcagcctgcctccgtgtctgggtctcctggacagtcgatcaccatctcctgcactggaaccagcagtgacgttggtggttataactatgtctcctggtaccaacaacacccaggcaaagcccccaaactcatgatttatgatgtcagtaagcggccctcaggggtttctaatcgcttctctggctccaagtctggcaacacggcctccctgaccatctctgggctccagtctgaggacgaggctgattattactgcaactctttgacaagcatcagcacttgggtgttcggcggagggaccaagctgaccgtccta

SEQ ID NO: 1764 - protein, 110 aa, Artificial Sequence
  REGN10987 VL PRT
QSALTQPASVSGSPGQSITISCTGTSSDVGGYNYVSWYQQHPGKAPKLMIYDVSKRPSGVSNRFSGSKSGNTASLTISGLQSEDEADYYCNSLTSISTWVFGGGTKLTVL

SEQ ID NO: 1765 - DNA, 360 bp, Artificial Sequence
  REGN10987 VH DNA
caggtgcagctggtggagtctgggggaggcgtggtccagcctgggaggtccctgagactctcctgtgcagcctctggattcaccttcagtaactatgctatgtactgggtccgccaggctccaggcaaggggctggagtgggtggcagttatatcatatgatggaagtaataaatactatgcagactccgtgaagggccgattcaccatctccagagacaattccaagaacacgctgtatctgcaaatgaacagcctgagaactgaggacacggctgtgtattactgtgcgagtggctccgactacggtgactacttattggtttactggggccagggaaccctggtcaccgtgtcctca

SEQ ID NO: 1766 - protein, 120 aa, Artificial Sequence
  REGN10987 VH PRT
QVQLVESGGGVVQPGRSLRLSCAASGFTFSNYAMYWVRQAPGKGLEWVAVISYDGSNKYYADSVKGRFTISRDNSKNTLYLQMNSLRTEDTAVYYCASGSDYGDYLLVYWGQGTLVTVSS

SEQ ID NO: 1767 - DNA, 1344 bp, Artificial Sequence
  REGN10987 VH complete DNA
caggtgcagctggtggagtctgggggaggcgtggtccagcctgggaggtccctgagactctcctgtgcagcctctggattcaccttcagtaactatgctatgtactgggtccgccaggctccaggcaaggggctggagtgggtggcagttatatcatatgatggaagtaataaatactatgcagactccgtgaagggccgattcaccatctccagagacaattccaagaacacgctgtatctgcaaatgaacagcctgagaactgaggacacggctgtgtattactgtgcgagtggctccgactacggtgactacttattggtttactggggccagggaaccctggtcaccgtgtcctcagctagcaccaagggcccatcggtcttccccctggcaccctcctccaagagcacctctgggggcacagcggccctgggctgcctggtcaaggactacttccccgaaccggtgacggtgtcgtggaactcaggcgccctgaccagcggcgtgcacaccttcccggctgtcctacagtcctcaggactctactccctcagcagcgtggtgaccgtgccctccagcagcttgggcacccagacctacatctgcaacgtgaatcacaagcccagcaacaccaaggtggacaagaaagttgagcccaaatcttgtgacaaaactcacacatgcccaccgtgcccagcacctccagtggccggaccgtcagtcttcctcttccccccaaaacccaaggacaccctcatgatctcccggacccctgaggtcacatgcgtggtggtgggcgtgagccacgaagaccctgaggtcaagttcaactggtacgtggacggcgtggaggtgcataatgccaagacaaagccgcgggaggagcagtacaacagcacgtaccgggtggtcagcgtcctcaccgtcctgcaccaggactggctgaatggcaaggagtacaagtgcaaggtctccaacaaacagctcccatcccccatcgagaaaaccatctccaaagccaaagggcagccccgagaaccacaggtgtacaccctgcccccatcccgggatgagctgaccaagaaccaggtcagcctgacctgcctggtcaaaggcttctatcccagcgacatcgccgtggagtgggagagcaatgggcagccggagaacaactacaagaccacgcctcccgtgctggactccgacggctccttcttcctctacagcaagctcaccgtggacaagagcaggtggcagcaggggaacgtcttctcatgctccgtgatgcatgaggctctgcacaaccactacacgcagaaaagcctctccctgtccccgggt

SEQ ID NO: 1768 - protein, 448 aa, Artificial Sequence
  REGN10987 VH complete PRT
QVQLVESGGGVVQPGRSLRLSCAASGFTFSNYAMYWVRQAPGKGLEWVAVISYDGSNKYYADSVKGRFTISRDNSKNTLYLQMNSLRTEDTAVYYCASGSDYGDYLLVYWGQGTLVTVSSASTKGPSVFPLAPSSKSTSGGTAALGCLVKDYFPEPVTVSWNSGALTSGVHTFPAVLQSSGLYSLSSVVTVPSSSLGTQTYICNVNHKPSNTKVDKKVEPKSCDKTHTCPPCPAPPVAGPSVFLFPPKPKDTLMISRTPEVTCVVVGVSHEDPEVKFNWYVDGVEVHNAKTKPREEQYNSTYRVVSVLTVLHQDWLNGKEYKCKVSNKQLPSPIEKTISKAKGQPREPQVYTLPPSRDELTKNQVSLTCLVKGFYPSDIAVEWESNGQPENNYKTTPPVLDSDGSFFLYSKLTVDKSRWQQGNVFSCSVMHEALHNHYTQKSLSLSPG

SEQ ID NO: 1769 - DNA, 648 bp, Artificial Sequence
  REGN10987 VL complete DNA
cagtctgccctgactcagcctgcctccgtgtctgggtctcctggacagtcgatcaccatctcctgcactggaaccagcagtgacgttggtggttataactatgtctcctggtaccaacaacacccaggcaaagcccccaaactcatgatttatgatgtcagtaagcggccctcaggggtttctaatcgcttctctggctccaagtctggcaacacggcctccctgaccatctctgggctccagtctgaggacgaggctgattattactgcaactctttgacaagcatcagcacttgggtgttcggcggagggaccaagctgaccgtcctaggtcagcccaaggctgcaccaagtgtcactctgttcccgccctcctctgaggagcttcaagccaacaaggccacactggtgtgtctcataagtgacttctacccgggagccgtgacagtggcctggaaggcagatagcagccccgtcaaggcgggagtggagaccaccacaccctccaaacaaagcaacaacaagtacgcggccagcagctatctgagcctgacgcctgagcagtggaagtcccacagaagctacagctgccaggtcacgcatgaagggagcaccgtggagaagacagtggcccctacagaatgttca

SEQ ID NO: 1770 - protein, 216 aa, Artificial Sequence
  REGN10987 VL complete PRT
QSALTQPASVSGSPGQSITISCTGTSSDVGGYNYVSWYQQHPGKAPKLMIYDVSKRPSGVSNRFSGSKSGNTASLTISGLQSEDEADYYCNSLTSISTWVFGGGTKLTVLGQPKAAPSVTLFPPSSEELQANKATLVCLISDFYPGAVTVAWKADSSPVKAGVETTTPSKQSNNKYAASSYLSLTPEQWKSHRSYSCQVTHEGSTVEKTVAPTECS

SEQ ID NO: 1771 - DNA, 15 bp, Artificial Sequence
  CB6 HCDR1 DNA
agtaattatatgtca

SEQ ID NO: 1772 - protein, 5 aa, Artificial Sequence
  CB6 HCDR1 PRT
SNYMS

SEQ ID NO: 1773 - DNA, 48 bp, Artificial Sequence
  CB6 HCDR2 DNA
gtgatctacagcggtgggagcacattttatgcggatagtgttaagggt

SEQ ID NO: 1774 - protein, 16 aa, Artificial Sequence
  CB6 HCDR2 PRT
VIYSGGSTFYADSVKG

SEQ ID NO: 1775 - DNA, 33 bp, Artificial Sequence
  CB6 HCDR3 DNA
gttcttccaatgtatggcgattacttggattat

SEQ ID NO: 1776 - protein, 11 aa, Artificial Sequence
  CB6 HCDR3 PRT
VLPMYGDYLDY

SEQ ID NO: 1777 - DNA, 33 bp, Artificial Sequence
  CB6 LCDR1 DNA
cgcgcatcccaaagcatctctcggtatcttaat

SEQ ID NO: 1778 - protein, 11 aa, Artificial Sequence
  CB6 LCDR1 PRT
RASQSISRYLN

SEQ ID NO: 1779 - DNA, 21 bp, Artificial Sequence
  CB6 LCDR2 DNA
gcagctagttcacttcagtca

SEQ ID NO: 1780 - protein, 7 aa, Artificial Sequence
  CB6 LCDR2 PRT
AASSLQS

SEQ ID NO: 1781 - DNA, 33 bp, Artificial Sequence
  CB6 LCDR3 DNA
caacagtcatatagcacaccgcccgagtacact

SEQ ID NO: 1782 - protein, 11 aa, Artificial Sequence
  CB6 LCDR3 PRT
QQSYSTPPEYT

SEQ ID NO: 1783 - DNA, 327 bp, Artificial Sequence
  CB6 VL DNA
gatatagtaatgacacagtccccctccagtcttagtgcctccgtgggcgaccgagttacgattacctgccgcgcatcccaaagcatctctcggtatcttaattggtaccaacaaaagcctggaaaggcgcccaaattgttgatatacgcagctagttcacttcagtcaggggtgccgagtcggttcagcgggtccggtagcggcaccgatttcacactcacaatttctagcctgcaacccgaagactttgctacctattactgtcaacagtcatatagcacaccgcccgagtacactttcgggcaggggaccaagctggagatcaaa

SEQ ID NO: 1784 - protein, 109 aa, Artificial Sequence
  CB6 VL PRT
DIVMTQSPSSLSASVGDRVTITCRASQSISRYLNWYQQKPGKAPKLLIYAASSLQSGVPSRFSGSGSGTDFTLTISSLQPEDFATYYCQQSYSTPPEYTFGQGTKLEIK

SEQ ID NO: 1785 - DNA, 357 bp, Artificial Sequence
  CB6 VH DNA
gaagttcagttggtggagtcagggggaggtcttgtccagccaggtggctccctgagattgagttgcgctgcttctggattcactgtgagcagtaattatatgtcatgggtgcgccaggcgcctgggaaggggcttgagtgggtgtccgtgatctacagcggtgggagcacattttatgcggatagtgttaagggtaggtttacgatatctcgagataattccatgaacacattgttcttgcaaatgaacagccttcgggctgaagacactgccgtctattactgtgctagagttcttccaatgtatggcgattacttggattattgggggcaagggacactcgtgactgtttcctca

SEQ ID NO: 1786 - protein, 119 aa, Artificial Sequence
  CB6 VH PRT
EVQLVESGGGLVQPGGSLRLSCAASGFTVSSNYMSWVRQAPGKGLEWVSVIYSGGSTFYADSVKGRFTISRDNSMNTLFLQMNSLRAEDTAVYYCARVLPMYGDYLDYWGQGTLVTVSS

SEQ ID NO: 1787 - DNA, 1341 bp, Artificial Sequence
  CB6 VH complete DNA
gaagttcagttggtggagtcagggggaggtcttgtccagccaggtggctccctgagattgagttgcgctgcttctggattcactgtgagcagtaattatatgtcatgggtgcgccaggcgcctgggaaggggcttgagtgggtgtccgtgatctacagcggtgggagcacattttatgcggatagtgttaagggtaggtttacgatatctcgagataattccatgaacacattgttcttgcaaatgaacagccttcgggctgaagacactgccgtctattactgtgctagagttcttccaatgtatggcgattacttggattattgggggcaagggacactcgtgactgtttcctcagctagcaccaagggcccatcggtcttccccctggcaccctcctccaagagcacctctgggggcacagcggccctgggctgcctggtcaaggactacttccccgaaccggtgacggtgtcgtggaactcaggcgccctgaccagcggcgtgcacaccttcccggctgtcctacagtcctcaggactctactccctcagcagcgtggtgaccgtgccctccagcagcttgggcacccagacctacatctgcaacgtgaatcacaagcccagcaacaccaaggtggacaagaaagttgagcccaaatcttgtgacaaaactcacacatgcccaccgtgcccagcacctccagtggccggaccgtcagtcttcctcttccccccaaaacccaaggacaccctcatgatctcccggacccctgaggtcacatgcgtggtggtgggcgtgagccacgaagaccctgaggtcaagttcaactggtacgtggacggcgtggaggtgcataatgccaagacaaagccgcgggaggagcagtacaacagcacgtaccgggtggtcagcgtcctcaccgtcctgcaccaggactggctgaatggcaaggagtacaagtgcaaggtctccaacaaacagctcccatcccccatcgagaaaaccatctccaaagccaaagggcagccccgagaaccacaggtgtacaccctgcccccatcccgggatgagctgaccaagaaccaggtcagcctgacctgcctggtcaaaggcttctatcccagcgacatcgccgtggagtgggagagcaatgggcagccggagaacaactacaagaccacgcctcccgtgctggactccgacggctccttcttcctctacagcaagctcaccgtggacaagagcaggtggcagcaggggaacgtcttctcatgctccgtgatgcatgaggctctgcacaaccactacacgcagaaaagcctctccctgtccccgggt

SEQ ID NO: 1788 - protein, 447 aa, Artificial Sequence
  CB6 VH complete PRT
EVQLVESGGGLVQPGGSLRLSCAASGFTVSSNYMSWVRQAPGKGLEWVSVIYSGGSTFYADSVKGRFTISRDNSMNTLFLQMNSLRAEDTAVYYCARVLPMYGDYLDYWGQGTLVTVSSASTKGPSVFPLAPSSKSTSGGTAALGCLVKDYFPEPVTVSWNSGALTSGVHTFPAVLQSSGLYSLSSVVTVPSSSLGTQTYICNVNHKPSNTKVDKKVEPKSCDKTHTCPPCPAPPVAGPSVFLFPPKPKDTLMISRTPEVTCVVVGVSHEDPEVKFNWYVDGVEVHNAKTKPREEQYNSTYRVVSVLTVLHQDWLNGKEYKCKVSNKQLPSPIEKTISKAKGQPREPQVYTLPPSRDELTKNQVSLTCLVKGFYPSDIAVEWESNGQPENNYKTTPPVLDSDGSFFLYSKLTVDKSRWQQGNVFSCSVMHEALHNHYTQKSLSLSPG

SEQ ID NO: 1789 - DNA, 648 bp, Artificial Sequence
  CB6 VL complete DNA
gatatagtaatgacacagtccccctccagtcttagtgcctccgtgggcgaccgagttacgattacctgccgcgcatcccaaagcatctctcggtatcttaattggtaccaacaaaagcctggaaaggcgcccaaattgttgatatacgcagctagttcacttcagtcaggggtgccgagtcggttcagcgggtccggtagcggcaccgatttcacactcacaatttctagcctgcaacccgaagactttgctacctattactgtcaacagtcatatagcacaccgcccgagtacactttcgggcaggggaccaagctggagatcaaacgtacggtggctgcaccatctgtgttcatcttcccgccatctgatgagcagttgaaatctggaactgcctctgttgtgtgcctgctgaataacttctatcccagagaggccaaagtacagtggaaggtggataacgccctccaatcgggtaactcccaggagagtgtcacagagcaggacagcaaggacagcacctacagcctcagcagcaccctgacgctgagcaaagcagactacgagaaacacaaagtctacgcctgcgaagtcacccatcagggcctgagctcgcccgtcacaaagagcttcaacaggggagagtgt

SEQ ID NO: 1790 - protein, 216 aa, Artificial Sequence
  CB6 VL complete PRT
DIVMTQSPSSLSASVGDRVTITCRASQSISRYLNWYQQKPGKAPKLLIYAASSLQSGVPSRFSGSGSGTDFTLTISSLQPEDFATYYCQQSYSTPPEYTFGQGTKLEIKRTVAAPSVFIFPPSDEQLKSGTASVVCLLNNFYPREAKVQWKVDNALQSGNSQESVTEQDSKDSTYSLSSTLTLSKADYEKHKVYACEVTHQGLSSPVTKSFNRGEC

SEQ ID NO: 1791 - DNA, 15 bp, Artificial Sequence
  CR3022 HCDR1 DNA
acgtactggattggc

SEQ ID NO: 1792 - protein, 5 aa, Artificial Sequence
  CR3022 HCDR1 PRT
TYWIG

SEQ ID NO: 1793 - DNA, 51 bp, Artificial Sequence
  CR3022 HCDR2 DNA
ataatttaccctggcgattcagagactcggtattctccatcctttcagggc

SEQ ID NO: 1794 - protein, 16 aa, Artificial Sequence
  CR3022 HCDR2 PRT
IIYPGDSETRYSPSFQ

SEQ ID NO: 1795 - DNA, 30 bp, Artificial Sequence
  CR3022 HCDR3 DNA
ggatcaggaatcagcacgcccatggacgta

SEQ ID NO: 1796 - protein, 10 aa, Artificial Sequence
  CR3022 HCDR3 PRT
GSGISTPMDV

SEQ ID NO: 1797 - DNA, 51 bp, Artificial Sequence
  CR3022 LCDR1 DNA
aaatctagccagtctgttctgtactcatctataaataagaactatcttgcg

SEQ ID NO: 1798 - protein, 16 aa, Artificial Sequence
  CR3022 LCDR1 PRT
KSSQSVLYSSINKNYL

SEQ ID NO: 1799 - DNA, 21 bp, Artificial Sequence
  CR3022 LCDR2 DNA
tgggcttccacgagagaaagc

SEQ ID NO: 1800 - protein, 7 aa, Artificial Sequence
  CR3022 LCDR2 PRT
WASTRES

SEQ ID NO: 1801 - DNA, 27 bp, Artificial Sequence
  CR3022 LCDR3 DNA
cagcaatactattccacaccctacaca

SEQ ID NO: 1802 - protein, 9 aa, Artificial Sequence
  CR3022 LCDR3 PRT
QQYYSTPYT

SEQ ID NO: 1803 - DNA, 339 bp, Artificial Sequence
  CR3022 VL DNA
gatattcagctcacccagtctccagactctctggcggtctcactcggtgagagagcgacaataaactgtaaatctagccagtctgttctgtactcatctataaataagaactatcttgcgtggtaccagcagaaaccaggtcagcctcctaagctcttgatttactgggcttccacgagagaaagcggcgtgcccgaccggttcagcggctcagggagcggcactgatttcactctgacgatcagcagtctgcaggccgaggatgtagccgtatattattgtcagcaatactattccacaccctacacattcgggcagggaactaaagttgagataaag

SEQ ID NO: 1804 - protein, 112 aa, Artificial Sequence
  CR3022 VL PRT
DIQLTQSPDSLAVSLGERATINCKSSQSVLYSSINKNYLAWYQQKPGQPPKLLIYWASTRESGVPDRFSGSGSGTDFTLTISSLQAEDVAVYYCQQYYSTPYTFGQGTKVEI

SEQ ID NO: 1805 - DNA, 357 bp, Artificial Sequence
  CR3022 VH DNA
caaatgcagttggtacagagtggtaccgaggtcaaaaaacctggcgagagtctcaaaatctcatgcaaagggtccggctatggattcattacgtactggattggctgggttaggcagatgccggggaaagggcttgagtggatgggaataatttaccctggcgattcagagactcggtattctccatcctttcagggccaagtcacaatttcagcagataagtccatcaacaccgcgtacctccagtggtctagtttgaaagcaagcgacacagccatatattattgcgccggtggatcaggaatcagcacgcccatggacgtatggggacagggcactacagtcacagtttcaagt

SEQ ID NO: 1806 - protein, 119 aa, Artificial Sequence
  CR3022 VH PRT
QMQLVQSGTEVKKPGESLKISCKGSGYGFITYWIGWVRQMPGKGLEWMGIIYPGDSETRYSPSFQGQVTISADKSINTAYLQWSSLKASDTAIYYCAGGSGISTPMDVWGQGTTVTVSS

SEQ ID NO: 1807 - DNA, 1341 bp, Artificial Sequence
  CR3022 VH complete DNA
caaatgcagttggtacagagtggtaccgaggtcaaaaaacctggcgagagtctcaaaatctcatgcaaagggtccggctatggattcattacgtactggattggctgggttaggcagatgccggggaaagggcttgagtggatgggaataatttaccctggcgattcagagactcggtattctccatcctttcagggccaagtcacaatttcagcagataagtccatcaacaccgcgtacctccagtggtctagtttgaaagcaagcgacacagccatatattattgcgccggtggatcaggaatcagcacgcccatggacgtatggggacagggcactacagtcacagtttcaagtgctagcaccaagggcccatcggtcttccccctggcaccctcctccaagagcacctctgggggcacagcggccctgggctgcctggtcaaggactacttccccgaaccggtgacggtgtcgtggaactcaggcgccctgaccagcggcgtgcacaccttcccggctgtcctacagtcctcaggactctactccctcagcagcgtggtgaccgtgccctccagcagcttgggcacccagacctacatctgcaacgtgaatcacaagcccagcaacaccaaggtggacaagaaagttgagcccaaatcttgtgacaaaactcacacatgcccaccgtgcccagcacctccagtggccggaccgtcagtcttcctcttccccccaaaacccaaggacaccctcatgatctcccggacccctgaggtcacatgcgtggtggtgggcgtgagccacgaagaccctgaggtcaagttcaactggtacgtggacggcgtggaggtgcataatgccaagacaaagccgcgggaggagcagtacaacagcacgtaccgggtggtcagcgtcctcaccgtcctgcaccaggactggctgaatggcaaggagtacaagtgcaaggtctccaacaaacagctcccatcccccatcgagaaaaccatctccaaagccaaagggcagccccgagaaccacaggtgtacaccctgcccccatcccgggatgagctgaccaagaaccaggtcagcctgacctgcctggtcaaaggcttctatcccagcgacatcgccgtggagtgggagagcaatgggcagccggagaacaactacaagaccacgcctcccgtgctggactccgacggctccttcttcctctacagcaagctcaccgtggacaagagcaggtggcagcaggggaacgtcttctcatgctccgtgatgcatgaggctctgcacaaccactacacgcagaaaagcctctccctgtccccgggt

SEQ ID NO: 1808 - protein, 447 aa, Artificial Sequence
  CR3022 VH complete PRT
QMQLVQSGTEVKKPGESLKISCKGSGYGFITYWIGWVRQMPGKGLEWMGIIYPGDSETRYSPSFQGQVTISADKSINTAYLQWSSLKASDTAIYYCAGGSGISTPMDVWGQGTTVTVSSASTKGPSVFPLAPSSKSTSGGTAALGCLVKDYFPEPVTVSWNSGALTSGVHTFPAVLQSSGLYSLSSVVTVPSSSLGTQTYICNVNHKPSNTKVDKKVEPKSCDKTHTCPPCPAPPVAGPSVFLFPPKPKDTLMISRTPEVTCVVVGVSHEDPEVKFNWYVDGVEVHNAKTKPREEQYNSTYRVVSVLTVLHQDWLNGKEYKCKVSNKQLPSPIEKTISKAKGQPREPQVYTLPPSRDELTKNQVSLTCLVKGFYPSDIAVEWESNGQPENNYKTTPPVLDSDGSFFLYSKLTVDKSRWQQGNVFSCSVMHEALHNHYTQKSLSLSPG

SEQ ID NO: 1809 - DNA, 660 bp, Artificial Sequence
  CR3022 VL complete DNA
gatattcagctcacccagtctccagactctctggcggtctcactcggtgagagagcgacaataaactgtaaatctagccagtctgttctgtactcatctataaataagaactatcttgcgtggtaccagcagaaaccaggtcagcctcctaagctcttgatttactgggcttccacgagagaaagcggcgtgcccgaccggttcagcggctcagggagcggcactgatttcactctgacgatcagcagtctgcaggccgaggatgtagccgtatattattgtcagcaatactattccacaccctacacattcgggcagggaactaaagttgagataaagcgtacggtggctgcaccatctgtgttcatcttcccgccatctgatgagcagttgaaatctggaactgcctctgttgtgtgcctgctgaataacttctatcccagagaggccaaagtacagtggaaggtggataacgccctccaatcgggtaactcccaggagagtgtcacagagcaggacagcaaggacagcacctacagcctcagcagcaccctgacgctgagcaaagcagactacgagaaacacaaagtctacgcctgcgaagtcacccatcagggcctgagctcgcccgtcacaaagagcttcaacaggggagagtgt

SEQ ID NO: 1810 - protein, 220 aa, Artificial Sequence
  CR3022 VL complete PRT
DIQLTQSPDSLAVSLGERATINCKSSQSVLYSSINKNYLAWYQQKPGQPPKLLIYWASTRESGVPDRFSGSGSGTDFTLTISSLQAEDVAVYYCQQYYSTPYTFGQGTKVEIKRTVAAPSVFIFPPSDEQLKSGTASVVCLLNNFYPREAKVQWKVDNALQSGNSQESVTEQDSKDSTYSLSSTLTLSKADYEKHKVYACEVTHQGLSSPVTKSFNRGEC

SEQ ID NO: 1811 - protein, 27 aa, Artificial Sequence
  Epitope within RBD (amino acids 437 to 463)
NSNNLDSKVGGNYNYLYRLFRKSNLKP

SEQ ID NO: 1812 - protein, 7 aa, Artificial Sequence
  Epitope within RBD (amino acids 445 to 451)
VGGNYNY

SEQ ID NO: 1813 - protein, 11 aa, Artificial Sequence
  Epitope within RBD (amino acids 445 to 455)
VGGNYNYLYRL

SEQ ID NO: 1814 - protein, 15 aa, Artificial Sequence
  Epitope within RBD (amino acids 445 to 459)
VGGNYNYLYRLFRKS

SEQ ID NO: 1815 - protein, 11 aa, Artificial Sequence
  Epitope within RBD (amino acids 449 to 459)
YNYLYRLFRKS

SEQ ID NO: 1816 - protein, 10 aa, Artificial Sequence
  Epitope within RBD (amino acids 342 to 351)
VFNTRFASVY

SEQ ID NO: 1817 - protein, 11 aa, Artificial Sequence
  Epitope within RBD (amino acids 349 to 359)
SVYAWNRKRIS

SEQ ID NO: 1818 - protein, 7 aa, Artificial Sequence
  Epitope within RBD (amino acids 485 to 491)
GFNCYFP

SEQ ID NO: 1819 - protein, 6 aa, Artificial Sequence
  Epitope within RBD (amino acids 497 to 502)
FQPTNV

SEQ ID NO: 1820 - protein, 23 aa, Artificial Sequence
  Epitope within RBD (amino acids 400 to 422)
FVIRGDEVRQIAPQTGKIADDYN

SEQ ID NO: 1821 - protein, 16 aa, Artificial Sequence
  Epitope within RBD (amino acids 165 to 180)
AKRVNCYFPLQSYGFQ

SEQ ID NO: 1822 - protein, 5 aa, Artificial Sequence
  Epitope within RBD (amino acids 365 to 369)
YSFLY

SEQ ID NO: 1823 - protein, 7 aa, Artificial Sequence
  Epitope within RBD (amino acids 436 to 443)
WNSKNLD

SEQ ID NO: 1824 - protein, 16 aa, Artificial Sequence
  Epitope within RBD (amino acids 474 to 489)
QASSTPCNGAKRVNCY

SEQ ID NO: 1825 - protein, 8 aa, Artificial Sequence
  Epitope within RBD (amino acids 483 to 490)
VEGFNCYF

SEQ ID NO: 1826 - protein, 22 aa, Artificial Sequence
  Epitope within RBD (amino acids 400 to 422)
FVIRGDEVRQIAPQTGKIADYN

SEQ ID NO: 1827 - protein, 11 aa, Artificial Sequence
  Epitope within RBD (amino acids 470 to 480)
TEIYQAGSTPC

SEQ ID NO: 1828 - protein, 21 aa, Artificial Sequence
  Epitope within RBD (amino acids 483 to 505)
VEGFNCYFPLQSYGFQPTNGV

SEQ ID NO: 1829 - protein, 224 aa, Artificial Sequence
  partial S1-Domain (7PM)
RVQPTESIVRFPNITNLCPFGEVFNATRFASVYAWNRKRISNCVADYSFLYNSASFSTFKCYGVSPTKLNDLCFTNVYADSFVIRGDEVRQIAPGQTGKIADYNYKLPDDFTGCVIAWNSKNLDSKVGGNYNYLYRLFRKSNLKPFERDISTEIYQASSTPCNGAKRVNCYFPLQSYGFQPTNGVGYQPYRVVVLSFELLHAPATVCGPKKSTNLVKNKCVNFN

SEQ ID NO: 1830 - protein, 224 aa, Artificial Sequence
  partial S1-Domain (wild-type)
RVQPTESIVRFPNITNLCPFGEVFNATRFASVYAWNRKRISNCVADYSVLYNSASFSTFKCYGVSPTKLNDLCFTNVYADSFVIRGDEVRQIAPGQTGKIADYNYKLPDDFTGCVIAWNSNNLDSKVGGNYNYLYRLFRKSNLKPFERDISTEIYQAGSTPCNGVEGFNCYFPLQSYGFQPTNGVGYQPYRVVVLSFELLHAPATVCGPKKSTNLVKNKCVNFN

SEQ ID NO: 1831 - protein, 11 aa, Artificial Sequence
  "archetype" light chain CDR1
RASQGISSYLA

SEQ ID NO: 1832 - protein, 7 aa, Artificial Sequence
  "archetype" light chain CDR2
AASTLQS

SEQ ID NO: 1833 - protein, 10 aa, Artificial Sequence
  "archetype" light chain CDR3
  VARIANT (8)..(8): Xaa is proline or can be deleted
  VARIANT (9)..(9): Xaa is phenylalanine or isoleucine
QQLNSYPXXT

SEQ ID NO: 1834 - protein, 5 aa, Artificial Sequence
  "archetype" heavy chain CDR1
SNYMS

SEQ ID NO: 1835 - protein, 16 aa, Artificial Sequence
  "archetype" heavy chain CDR2
VIYSGGSTYYADSVKG

SEQ ID NO: 1836 - protein, 9 aa, Artificial Sequence
  "archetype" heavy chain CDR3
  VARIANT (2)..(2): Xaa is valine or leucine
  VARIANT (3)..(3): Xaa is alanine or valine
  VARIANT (4)..(4): Xaa can be any naturally occurring amino acid
  VARIANT (5)..(5): Xaa can be any naturally occurring amino acid
  VARIANT (6)..(6): Xaa is alanine or glycine
  VARIANT (7)..(7): Xaa is phenylalanine or leucine
  VARIANT (9)..(9): Xaa is isoleucine or valine
DXXXXXXDX

SEQ ID NO: 1837 - protein, 13 aa, Artificial Sequence
  "generalized" light chain CDR1
  VARIANT (1)..(1): Xaa can be any naturally occurring amino acid
  VARIANT (2)..(2): Xaa is alanine or glycine
  VARIANT (4)..(4): Xaa is glycine or serine
  VARIANT (5)..(5): Xaa is serine or glycine
  VARIANT (6)..(7): Xaa can be deleted or any naturally occurring amino acid
  VARIANT (8)..(8): Xaa can be any naturally occurring amino acid
  VARIANT (9)..(9): Xaa is asparagine or serine
  VARIANT (10)..(10): Xaa is asparagine or serine
  VARIANT (12)..(12): Xaa is leucine or valine
  VARIANT (13)..(13): Xaa is alanine or serine
XXSXXXXXXXYXX

SEQ ID NO: 1838 - protein, 13 aa, Artificial Sequence
  "generalized" light chain CDR1
  VARIANT (1)..(2): Xaa can be any naturally occurring amino acid
  VARIANT (4)..(10): Xaa can be any naturally occurring amino acid
  VARIANT (12)..(13): Xaa can be any naturally occurring amino acid
XXSXXXXXXXYXX

SEQ ID NO: 1839 - protein, 7 aa, Artificial Sequence
  "generalized" light chain CDR2
  VARIANT (1)..(1): Xaa can be any naturally occurring amino acid
  VARIANT (2)..(2): Xaa is threonine or alanine
  VARIANT (3)..(3): Xaa is asparagine or serine
  VARIANT (4)..(4): Xaa is lysine or threonine
  VARIANT (5)..(6): Xaa can be any naturally occurring amino acid
XXXXXXS

SEQ ID NO: 1840 - protein, 7 aa, Artificial Sequence
  "generalized" light chain CDR2
  VARIANT (1)..(6): Xaa can be any naturally occurring amino acid
XXXXXXS

SEQ ID NO: 1841 - protein, 11 aa, Artificial Sequence
  "generalized" light chain CDR3
  VARIANT (1)..(3): Xaa can be deleted or any naturally occurring amino acid
  VARIANT (4)..(4): Xaa is asparagine or aspartic acid
  VARIANT (4)..(10): Xaa can be deleted or any naturally occurring amino acid
  VARIANT (11)..(11): Xaa is valine or threonine
XXXXSXXXXXX

SEQ ID NO: 1842 - protein, 11 aa, Artificial Sequence
  "generalized" light chain CDR3
  VARIANT (1)..(4): Xaa can be any naturally occurring amino acid
  VARIANT (6)..(7): Xaa can be any naturally occurring amino acid
  VARIANT (8)..(9): Xaa can be deleted or any naturally occurring amino acid
  VARIANT (10)..(11): Xaa can be any naturally occurring amino acid
XXXXSXXXXXX

SEQ ID NO: 1843 - protein, 11 aa, Artificial Sequence
  "generalized" heavy chain CDR3
  VARIANT (1)..(1): Xaa is glycine or aspartic acid
  VARIANT (2)..(3): Xaa can be any naturally occurring amino acid
  VARIANT (4)..(6): Xaa can be deleted or any naturally occurring amino acid
  VARIANT (7)..(7): Xaa can be any naturally occurring amino acid
  VARIANT (8)..(8): Xaa is alanine or glycine
  VARIANT (9)..(9): Xaa is methionine, phenylalanine or leucine
  VARIANT (11)..(11): Xaa is isoleucine or valine
XXXXXXXXXDX

SEQ ID NO: 1844 - protein, 11 aa, Artificial Sequence
  "generalized" heavy chain CDR3
  VARIANT (1)..(3): Xaa can be any naturally occurring amino acid
  VARIANT (4)..(6): Xaa can be deleted or any naturally occurring amino acid
  VARIANT (7)..(9): Xaa can be any naturally occurring amino acid
  VARIANT (11)..(11): Xaa can be any naturally occurring amino acid
XXXXXXXXXDX
